(19) United States
(12) Patent Application Publication
(10) Pub. No.: US 2025/0276090 A1
(43) Pub. Date: Sep. 4, 2025

(54) Methods and Compositions for Genetically Modifying a Cell

(71) Applicant: Intellia Therapeutics, Inc., Cambridge, MA (US)

(72) Inventors: Birgit Schultes, Arlington, MA (US); Aaron Prodeus, Cambridge, MA (US); Özgün Kiliç, Cambridge, MA (US); Ruan Oliveira, Boston, MA (US); Christian Dombrowski, Auburndale, MA (US)

(73) Assignee: Intellia Therapeutics, Inc., Cambridge, MA (US)

(21) Appl. No.: 18/980,643

(22) Filed: Dec. 13, 2024

Related U.S. Application Data
(63) Continuation of application No. PCT/US23/68507, filed on Jun. 15, 2023.
(60) Provisional application No. 63/353,008, filed on Jun. 16, 2022.

(51) Int. Cl. A61K 48/00; C12N 9/12; C12N 9/22; C12N 15/11; C12N 15/88

(52) U.S. Cl. CPC A61K 48/005; C12N 9/1258; C12N 9/226; C12N 15/111; C12N 15/88; C07K 2319/80; C12N 2310/20; C12Y 207/07007

(57) ABSTRACT

Methods and compositions for genetically modifying a cell are provided.

### CROSS-REFERENCE TO RELATED APPLICATION

[0001] This application is a continuation of International Application No. PCT/US2023/068507, filed Jun. 15, 2023, which claims the benefit under 35 USC 119(e) of U.S. Provisional Application No. 63/353,008, filed Jun. 16, 2022, the content of each of which is herein incorporated by reference in its entirety.

### SEQUENCE LISTING

[0002] This application contains a sequence listing, which has been submitted electronically in XML file format and is hereby incorporated by reference in its entirety. Said XML file, created on Jun. 13, 2023, is named “01155-0060-00PCT_SL.xml” and is 2,718,632 bytes in size.

### INTRODUCTION AND SUMMARY

[0003] The ability to introduce multiple genetic edits into a cell is of interest for gene editing and clinical therapeutic applications. For example, adoptive cell therapy approaches using genetically modified immune cells have become an attractive modality to treat a variety of conditions and diseases, including cancers, to reconstitute cell lineages and immune system defense. However, the clinical application of cell product therapies has been challenging in part due to the complex genetic engineering requirements. The ability to engineer multiple attributes into a single cell depends on the ability to efficiently perform edits in multiple targeted genes, including knockouts and in locus insertions, while retaining viability and desired cell phenotypes.

[0004] CRISPR/Cas9 genome editing has been demonstrated to be highly efficient; however, simultaneous edits in different loci have been reported to result in poorer cell survival, increased translocations, which potentially impair the quality and safety of the cell product, and decreased gene editing efficiencies as the number of edits increase. Existing cell engineering technologies present limitations in providing the necessary cell quality and yield using a sequential editing process due to the cumulative toxicity to the cell.

[0005] Thus, there is a need for safer, more efficient processes for delivering multiple genome editing tools to a cell and for performing multiplexed gene editing, for example with fewer steps or within a shorter time period.

[0006] The methods provided herein comprise using at least two genome editing tools for multiplex genome editing applications, providing substantial advantages over traditional methods.

[0007] In some embodiments, the methods provided herein produce cells with greater survival and expansion, while maintaining high editing rates, thereby shortening the time required for manufacturing and increasing yield.

### BRIEF DESCRIPTION OF THE DRAWINGS

[0008] FIGS. 1A-1C show percent T cells lacking HLA-A surface expression following simultaneous insertion and base editing in 3 donors.

[0009] FIGS. 2A-2C show percent T cells lacking CD3 surface expression following simultaneous insertion and base editing in 3 donors.

[0010] FIGS. 3A-3C show percent T cells expressing transgenic T cell receptor following simultaneous insertion and base editing in 3 donors.

[0011] FIGS. 4A-4H show percent editing in T cells following simultaneous insertion and base editing in 3 donors.

[0012] FIG. 5A shows percent T cells showing full editing markers following simultaneous insertion and base editing using lipid nanoparticles in 4 donors.

[0013] FIG. 5B shows percent T cells lacking CD3 surface expression following simultaneous insertion and base editing using lipid nanoparticles in 4 donors.

[0014] FIG. 5C shows percent T cells lacking HLA-A2 surface expression, HLA-A3 surface expression, or both following simultaneous insertion and base editing using lipid nanoparticles in 4 donors.

[0015] FIG. 5D shows percent T cells lacking HLA-DP, DQ, DR surface expression following simultaneous insertion and base editing using lipid nanoparticles in 4 donors.

[0016] FIG. 5E shows percent T cells positive for surface expression the transgenic TCR following simultaneous insertion and base editing using lipid nanoparticles in 4 donors.

[0017] FIG. 6A shows percent editing at the albumin locus and relative luminescence in primary mouse hepatocytes.

[0018] FIG. 6B shows mean percent editing at the TTR locus in primary mouse hepatocytes.

[0019] FIG. 7A shows percent editing at the TTR locus in mouse liver.

[0020] FIG. 7B shows percent editing at the albumin locus in mouse liver.

[0021] FIG. 7C shows serum A1AT levels.

[0022] FIG. 8A shows percent GFP positive Donor 1 T cells following insertion at AAVS1.

[0023] FIG. 8B shows percent GFP positive Donor 2 T cells following insertion at AAVS1.

[0024] FIG. 9 shows the fold increase in cell population after the indicated days in expansion media.

[0025] FIGS. 10A-10B show the mean percent of full edited T cells with the CD4+ and CD8+ subpopulations, respectively

[0026] FIGS. 11A-11C show mean percent editing for TRAC, TRBC1, TRBC2 and CIITA loci after base editing.

[0027] FIG. 12A shows mean percent of CD8+ T cells scored as CD3− or Vb8+ by flow cytometry. FIG. 12B shows the mean percent of CD8+ T cells scored as negative for HLA-DP, DQ, DR, HLA-A2 OR HLA-A3 surface markers by flow cytometry.

[0028] FIG. 13A shows the mean percent of CD8+ engineered T cells displaying central memory stem cell phenotype. FIG. 13B shows the mean percent of CD8+ engineered T cells displaying markers for central memory cell phenotype. FIG. 13C shows the mean percent of CD8+ engineered T cells displaying markers for effector memory cell phenotype.

[0029] FIG. 14 shows mean percent target cell killing by engineered T cells.

[0030] FIG. 15 shows mean percent editing after treatment with 1.0 ug/ml or 0.5 ug·ml base editor mRNA.

[0031] FIG. 16 shows mean percent of T cells negative for indicated surface protein expression.

### BRIEF DESCRIPTION OF DISCLOSED SEQUENCES

| SEQ ID | |
|---|---|
| NO | Description |
| 1 | mRNA encoding SpyCas9 BC22n |
| 2 | Open reading frame for Sp BC22n |
| 3 | Amino acid sequence for Sp BC22n |
| 4 | mRNA encoding Sp BC22n with Hibit tag |
| 5 | Open reading frame for Sp BC22n with Hibit tag |
| 6 | Amino acid sequence for Sp BC22n with Hibit tag |
| 7 | mRNA encoding BE3 |
| 8 | Open reading frame for BE3 |
| 9 | Amino acid sequence for BE3 |
| 10 | mRNA encoding BE3 |
| 11 | Open reading frame for BE3 |
| 12 | Amino acid sequence for BE3 |
| 13 | mRNA encoding UGI |
| 14 | Open reading frame for UGI |
| 15 | Amino acid sequence for UGI |
| 16 | mRNA encoding Sp BC22 with 2x UGI |
| 17 | Open reading frame for Sp BC22 with 2x UGI |
| 18 | Amino acid sequence for Sp BC22 with 2x UGI |
| 19 | mRNA encoding BE4MAX protein |
| 20 | Open reading frame for BE4MAX protein |
| 21 | Amino acid sequence for BE4MAX protein |
| 22 | Amino acid sequence of H. sapiens APOBEC3A deaminase (A3A), see BC22 |
| 23 | |
| 24 | exemplary UGI |
| 25 | exemplary XTEN |
| 26 | exemplary XTEN |
| 27 | exemplary XTEN |
| 28 | amino acid sequence for exemplary linker |
| 29 | amino acid sequence for exemplary linker |
| 30 | amino acid sequence for exemplary linker |
| 31 | amino acid sequence for exemplary linker |
| 32 | amino acid sequence for exemplary linker |
| 33 | amino acid sequence for exemplary linker |
| 34 | amino acid sequence for exemplary linker |
| 35 | amino acid sequence for exemplary linker |
| 36 | amino acid sequence for exemplary linker |
| 37 | amino acid sequence for exemplary linker |
| 38 | amino acid sequence for exemplary linker |
| 39 | amino acid sequence for exemplary linker SGGS |
| 40 | amino acid acid sequence for SV40 NLS |
| 41 | Amino acid sequence of Sp Cas9 nickase (D10A) with 1x NLS as the C- |
| | terminal 7 amino acids |
| 42 | Sp Cas9 nickase (D10A) mRNA coding sequence using minimal uridine |
| | codons as listed in Table 3 (no start or stop codons; suitable for inclusion in |
| | fusion protein coding sequence) |
| 43 | Amino acid sequence of Sp Cas9 nickase (without NLS) |
| 44 | Cas9 nickase coding sequence encoding SEQ ID NO: 43 using minimal |
| | uridine codons as listed in Table 3 (no start or stop codons; suitable for |
| | inclusion in fusion protein coding sequence) |
| 45 | Amino acid sequence of Sp Cas9 nickase with two nuclear localization signals |
| | as the C-terminal amino acids |
| 46 | Sp Cas9 nickase coding sequence encoding SEQ ID NO: 45 using minimal |
| | uridine codons as listed in Table 3 (no start or stop codons; suitable for |
| | inclusion in fusion protein coding sequence) |
| 47 | Sp Cas9 nickase ORF using low A codons of Table 4, with start and stop |
| | codons |
| 48 | Sp Cas9 nickase ORF using low A codons of Table 4, with start and stop |
| | codons and no NLS |
| 49 | Sp Cas9 nickase ORF using low A codons of Table 4, with two C-terminal |
| | NLS sequences and start and stop codons |
| 50 | Sp Cas9 nickase ORF using low A/U codons of Table 4, with start and stop |
| | codons |
| 51 | Sp Cas9 nickase ORF using low A/U codons of Table 4, with two C-terminal |
| | NLS sequences and start and stop codons |
| 52 | Sp Cas9 nickase ORF using low A/U codons of Table 4, with start and stop |
| | codons and no NLS |
| 53 | Sp Cas9 nickase ORF using low A codons of Table 4 (no start or stop codons; |
| | suitable for inclusion in fusion protein coding sequence) |
| 54 | Sp Cas9 nickase ORF using low A codons of Table 4 (no NLS and no start or |
| | stop codons; suitable for inclusion in fusion protein coding sequence) |
| 55 | Sp Cas9 nickase ORF using low A codons of Table 4, with two C-terminal |
| | NLS sequences (no start or stop codons; suitable for inclusion in fusion |
| | protein coding sequence) |
| 56 | Sp Cas9 nickase ORF using low A/U codons of Table 4 (no start or stop |
| | codons; suitable for inclusion in fusion protein coding sequence) |
| 57 | Sp Cas9 nickase ORF using low A/U codons of Table 4, with two C-terminal |
| | NLS sequences (no start or stop codons; suitable for inclusion in fusion |
| | protein coding sequence) |
| 58 | Sp Cas9 nickase ORF using low A/U codons of Table 4 (no NLS and no start |
| | or stop codons; suitable for inclusion in fusion protein coding sequence) |
| 59 | Exemplary NLS 1 |
| 60 | Exemplary NLS 2 |
| 61 | Exemplary NLS 3 |
| 62 | Exemplary NLS 4 |
| 63 | Exemplary NLS 5 |
| 64 | Exemplary NLS 6 |
| 65 | Exemplary NLS 7 |
| 66 | Exemplary NLS 8 |
| 67 | Exemplary NLS 9 |
| 68 | Exemplary NLS 10 |
| 69 | Exemplary NLS 11 |
| 70 | Alternate SV40 NLS |
| 71 | Nucleoplasmin NLS |
| 72 | amino acid sequence for exemplary linker |
| 73 | amino acid sequence for exemplary linker |
| 74 | amino acid sequence for exemplary linker |
| 75 | amino acid sequence for exemplary linker |
| 76 | amino acid sequence for exemplary linker |
| 77 | amino acid sequence for exemplary linker |
| 78 | amino acid sequence for exemplary linker |
| 79 | amino acid sequence for exemplary linker |
| 80 | amino acid sequence for exemplary linker |
| 81 | amino acid sequence for exemplary linker |
| 82 | amino acid sequence for exemplary linker |
| 83 | amino acid sequence for exemplary linker |
| 84 | amino acid sequence for exemplary linker |
| 85 | amino acid sequence for exemplary linker |
| 86 | amino acid sequence for exemplary linker |
| 87 | amino acid sequence for exemplary linker |
| 88 | amino acid sequence for exemplary linker |
| 89 | amino acid sequence for exemplary linker |
| 90 | amino acid sequence for exemplary linker |
| 91 | amino acid sequence for exemplary linker |
| 92 | amino acid sequence for exemplary linker |
| 93 | amino acid sequence for exemplary linker |
| 94 | amino acid sequence for exemplary linker |
| 95 | amino acid sequence for exemplary linker |
| 96 | amino acid sequence for exemplary linker |
| 97 | amino acid sequence for exemplary linker |
| 98 | amino acid sequence for exemplary linker |
| 99 | amino acid sequence for exemplary linker |
| 100 | amino acid sequence for exemplary linker |
| 101 | amino acid sequence for exemplary linker |
| 102 | amino acid sequence for exemplary linker |
| 103 | amino acid sequence for exemplary linker |
| 104 | amino acid sequence for exemplary linker |
| 105 | amino acid sequence for exemplary linker |
| 106 | amino acid sequence for exemplary linker |
| 107 | amino acid sequence for exemplary linker |
| 108 | amino acid sequence for exemplary linker |
| 109 | amino acid sequence for exemplary linker |
| 110 | amino acid sequence for exemplary linker |
| 111 | amino acid sequence for exemplary linker |
| 112 | amino acid sequence for exemplary linker |
| 113 | amino acid sequence for exemplary linker |
| 114 | amino acid sequence for exemplary linker |
| 115 | amino acid sequence for exemplary linker |
| 116 | amino acid sequence for exemplary linker |
| 117 | amino acid sequence for exemplary linker |
| 118 | amino acid sequence for exemplary linker |
| 119 | amino acid sequence for exemplary linker |
| 120 | amino acid sequence for exemplary linker |
| 121 | amino acid sequence for exemplary linker |
| 122 | amino acid sequence for exemplary linker |
| 123 | amino acid sequence for exemplary linker |
| 124 | amino acid sequence for exemplary linker |
| 125 | amino acid sequence for exemplary linker |
| 126 | amino acid sequence for exemplary linker |
| 127 | amino acid sequence for exemplary linker |
| 128 | amino acid sequence for exemplary linker |
| 129 | amino acid sequence for exemplary linker |
| 130 | amino acid sequence for exemplary linker |
| 131 | amino acid sequence for exemplary linker |
| 132 | amino acid sequence for exemplary linker |
| 133 | amino acid sequence for exemplary linker |
| 134 | Exemplary mRNA encoding APOBEC3A-Nme2D16A |
| 135 | Exemplary open reading frame for APOBEC3A-Nme2D16A |
| 136 | Exemplary amino acid sequence for APOBEC3A-Nme2D16A |
| 137 | Exemplary mRNA encoding APOBEC3A-Nme2D16A |
| 138 | Exemplary open reading frame for APOBEC3A-Nme2D16A |
| 139 | Exemplary amino acid sequence for APOBEC3A-Nme2D16A |
| 140 | Exemplary mRNA encoding APOBEC3A-Nme2D16A |
| 141 | Exemplary open reading frame for APOBEC3A-Nme2D16A |
| 142 | Exemplary amino acid sequence for APOBEC3A-Nme2D16A |
| 143 | EXEMPLARY MRNA ENCODING APOBEC3A-NME2D16A |
| 144 | Exemplary open reading frame for APOBEC3A-Nme2D16A |
| 145 | Exemplary amino acid sequence for APOBEC3A-Nme2D16A |
| 146 | Exemplary amino acid sequence for NLS-NLS-APOBEC3A-L070- |
| | Nme2D16A |
| 147 | mRNA encoding BC22-Nme2D16A (Nme2 BC22n) |
| 148 | Amino acid sequence for base editor with linker L070 |
| 149 | amino acid sequence for D16A Nme2Cas9 nickase |
| 150 | coding sequence for D16A Nme2Cas9 nickase |
| 151 | coding sequence for D16A Nme2Cas9 nickase |
| 152 | coding sequence for D16A Nme2Cas9 nickase |
| 153 | open reading frame for D16A Nme2Cas9 nickase |
| 154 | open reading frame for D16A Nme2Cas9 nickase |
| 155 | open reading frame for D16A Nme2Cas9 nickase |
| 156 | Cas9 amino acid sequence |
| 157 | Amino acid sequence for Nme2Cas9 encoded by mRNA C |
| 158 | Amino acid sequence for Nme2Cas9 encoded by mRNA H |
| 159 | Amino acid sequence for Nme2Cas9 encoded by mRNA I |
| 160 | Amino acid sequence for Nme2Cas9 encoded by mRNA J |
| 161 | Amino acid sequence for Nme2Cas9 encoded by mRNA K |
| 162 | Amino acid sequence for Nme2Cas9 encoded by mRNA L |
| 163 | Amino acid sequence for Nme2Cas9 with HiBiT tag encoded by mRNA M |
| 164 | Amino acid sequence for Nme2Cas9 encoded by mRNA N |
| 165 | Amino acid sequence for Nme2Cas9 encoded by mRNA O |
| 166 | Amino acid sequence for Nme2Cas9 with HiBiT tag encoded by mRNA P |
| 167 | Amino acid sequence for Nme2Cas9 encoded by mRNA Q |
| 168 | mRNA C encoding Nme2Cas9 |
| 169 | mRNA H encoding Nme2Cas9 |
| 170 | mRNA I encoding Nme2Cas9 |
| 171 | mRNA J encoding Nme2Cas9 |
| 172 | mRNA K encoding Nme2Cas9 |
| 173 | mRNA L encoding Nme2Cas9 |
| 174 | mRNA M encoding Nme2Cas9 with HiBiT tag |
| 175 | mRNA N encoding Nme2Cas9 |
| 176 | mRNA O encoding Nme2Cas9 |
| 177 | mRNA P encoding Nme2Cas9 with HiBiT tag |
| 178 | mRNA Q encoding Nme2Cas9 |
| 179 | mRNA S encoding Nme2Cas9 base editor |
| 180 | Open reading frame for Nme2Cas9 encoded by mRNA C |
| 181 | Open reading frame for Nme2Cas9 encoded by mRNA H |
| 182 | Open reading frame for Nme2Cas9 encoded by mRNA I |
| 183 | Open reading frame for Nme2Cas9 encoded by mRNA J |
| 184 | Open reading frame for Nme2Cas9 encoded by mRNA K |
| 185 | Open reading frame for Nme2Cas9 encoded by mRNA L |
| 186 | Open reading frame for Nme2Cas9 with HiBiT tag encoded by mRNA M |
| 187 | Open reading frame for Nme2Cas9 encoded by mRNA N |
| 188 | Open reading frame for Nme2Cas9 encoded by mRNA O |
| 189 | Open reading frame for Nme2Cas9 with HiBiT tag encoded by mRNA P |
| 190 | Open reading frame for Nme2Cas9 encoded by mRNA Q |
| 191 | Exemplary amino acid sequence of Nme1Cas9 cleavase |
| 192 | Exemplary coding sequence encoding Nme1Cas9 cleavase |
| 193 | Exemplary coding sequence encoding Nme1Cas9 cleavase |
| 194 | Exemplary coding sequence encoding Nme1Cas9 cleavase |
| 195 | Exemplary open reading frame for Nme1Cas9 cleavase |
| 196 | Exemplary open reading frame for Nme1Cas9 cleavase |
| 197 | Exemplary open reading frame for Nme1Cas9 cleavase |
| 198 | Exemplary amino acid sequence of Nme1Cas9 HNH nickase |
| 199 | Exemplary coding sequence encoding Nme1Cas9 HNH nickase |
| 200 | Exemplary coding sequence encoding Nme1Cas9 HNH nickase |
| 201 | Exemplary coding sequence encoding Nme1Cas9 HNH nickase |
| 202 | Exemplary open reading frame for Nme1Cas9 HNH nickase |
| 203 | Exemplary open reading frame for Nme1Cas9 HNH nickase |
| 204 | Exemplary open reading frame for Nme1Cas9 HNH nickase |
| 205 | Exemplary amino acid sequence of Nme2Cas9 cleavase |
| 206 | Exemplary coding sequence encoding Nme2Cas9 cleavase |
| 207 | Exemplary coding sequence encoding Nme2Cas9 cleavase |
| 208 | Exemplary coding sequence encoding Nme2Cas9 cleavase |
| 209 | Exemplary open reading frame for Nme2Cas9 cleavase |
| 210 | Exemplary open reading frame for Nme2Cas9 cleavase |
| 211 | Exemplary open reading frame for Nme2Cas9 cleavase |
| 212 | Exemplary amino acid sequence of Nme3Cas9 cleavase |
| 213 | Exemplary coding sequence encoding Nme3Cas9 cleavase |
| 214 | Exemplary coding sequence encoding Nme3Cas9 cleavase |
| 215 | Exemplary coding sequence encoding Nme3Cas9 cleavase |
| 216 | Exemplary open reading frame for Nme3Cas9 cleavase |
| 217 | Exemplary open reading frame for Nme3Cas9 cleavase |
| 218 | Exemplary open reading frame for Nme3Cas9 cleavase |
| 219 | Exemplary amino acid sequence of Nme3Cas9 HNH nickase |
| 220 | Exemplary coding sequence encoding Nme3Cas9 HNH nickase |
| 221 | Exemplary coding sequence encoding Nme3Cas9 HNH nickase |
| 222 | Exemplary coding sequence encoding Nme3Cas9 HNH nickase |
| 223 | Exemplary open reading frame for Nme3Cas9 HNH nickase |
| 224 | Exemplary open reading frame for Nme3Cas9 HNH nickase |
| 225 | Exemplary open reading frame for Nme3Cas9 HNH nickase |
| 226 | Exemplary SpyCas9 sgRNA-1 |
| 227 | Exemplary nucleotide sequence following 3′ end of guide sequence |
| 228 | Exemplary modified SpyCas9 motif |
| 229 | Exemplary modified SpyCas9 conserved portion motif |
| 230 | Exemplary modified SpyCas9 conserved portion motif |
| 231 | Exemplary modified SpyCas9 conserved portion motif |
| 232 | Exemplary modified SpyCas9 conserved portion motif |
| 233 | Exemplary modified SpyCas9 conserved portion motif |
| 234 | Exemplary modified SpyCas9 conserved portion motif |
| 235 | Exemplary modified SpyCas9 conserved portion motif |
| 236 | Exemplary modified SpyCas9 conserved portion motif |
| 237 | Exemplary modified SpyCas9 conserved portion motif |
| 238 | Exemplary modified SpyCas9 conserved portion motif |
| 239 | Exemplary modified SpyCas9 conserved portion motif |
| 240 | Exemplary modified SpyCas9 conserved portion motif |
| 241 | Exemplary modified SpyCas9 conserved portion motif |
| 242 | Exemplary modified SpyCas9 conserved portion motif |
| 243 | Exemplary unmodified conserved portion nucleotide sequence |
| 244 | Exemplary unmodified conserved portion nucleotide sequence |
| 245 | Exemplary unmodified conserved portion nucleotide sequence |
| 246 | Exemplary modified conserved portion motif |
| 247 | Exemplary modified conserved portion motif |
| 248 | Exemplary modified conserved portion motif |
| 249 | Exemplary modified conserved portion motif |
| 250 | Exemplary modified conserved portion motif |
| 251 | G000562 |
| 252 | G013515 |
| 253 | G013519 |
| 254 | G013520 |
| 255 | G013523 |
| 256 | G013533 |
| 257 | G013543 |
| 258 | G013559 |
| 259 | G013562 |
| 260 | G013563 |
| 261 | G013564 |
| 262 | G013565 |
| 263 | G013582 |
| 264 | G013584 |
| 265 | G000562 (exemplary full sequence) |
| 266 | G013515 (exemplary full sequence) |
| 267 | G013519 (exemplary full sequence) |
| 268 | G013520 (exemplary full sequence) |
| 269 | G013523 (exemplary full sequence) |
| 270 | G013533 (exemplary full sequence) |
| 271 | G013543 (exemplary full sequence) |
| 272 | G013559 (exemplary full sequence) |
| 273 | G013562 (exemplary full sequence) |
| 274 | G013563 (exemplary full sequence) |
| 275 | G013564 (exemplary full sequence) |
| 276 | G013565 (exemplary full sequence) |
| 277 | G013582 (exemplary full sequence) |
| 278 | G013584 (exemplary full sequence) |
| 279 | G000562 (exemplary mod sequence) |
| 280 | G013515 (exemplary mod sequence) |
| 281 | G013519 (exemplary mod sequence) |
| 282 | G013520 (exemplary mod sequence) |
| 283 | G013523 (exemplary mod sequence) |
| 284 | G013533 (exemplary mod sequence) |
| 285 | G013543 (exemplary mod sequence) |
| 286 | G013559 (exemplary mod sequence) |
| 287 | G013562 (exemplary mod sequence) |
| 288 | G013563 (exemplary mod sequence) |
| 289 | G013564 (exemplary mod sequence) |
| 290 | G013565 (exemplary mod sequence) |
| 291 | G013582 (exemplary mod sequence) |
| 292 | G013584 (exemplary mod sequence) |
| 293 | Open reading frame for Cas9 |
| 294 | Amino acid sequence for Cas9 |
| 295 | Open reading frame for Cas9 |
| 296 | Amino acid sequence for Cas9-NLS |
| 297 | TCR insertion construct with homology arms flanking TRAC G013006 cut |
| | site - ITR included |
| 298 | bidirectional SERPINA insertion construct |
| 299 | Template A eGFP insertion construct with homology arms to mouse AAVS1 |
| 300 | Template B eGFP insertion construct with homology arms to mouse AAVS1 |
| 301 | Template C eGFP insertion construct with homology arms to mouse AAVS1 |
| 302 | Template D eGFP insertion construct with homology arms to mouse AAVS1 |
| 303 | Template OG eGFP insertion construct with homology arms to mouse |
| | AAVS1 |
| 304 | Bidirectional NanoLuc insertion Construct |
| 305 | Open reading frame for Nme2 Cas9 |
| 306 | Open reading frame for Sp Base Editor BC22n |
| 307 | Open reading frame for Sp Cas9 |
| 308 | Open reading frame for Nme2 Base Editor BC22n |
| 309 | Open reading frame for uracil glycosylase inhibitor (UGI) |
| 310 | Open reading frame encoding Nme2 base editor |
| 311 | Amino acid sequence of Nme2 base editor |
| 312 | Exemplary modified Nme guide sgRNA |
| 313 | Exemplary modified Nme guide sgRNA |
| 314 | Exemplary modified Nme guide sgRNA |
| 315-399 | Guide sequences or guide RNA full or modified sequences (see Table 21) |
| 400 | Exemplary NmeCas9 sgRNA-1 |

### DETAILED DESCRIPTION

[0032] The present disclosure provides, e.g., platform methods of contacting a cell with at least two genome editing tools and for multiplex genome editing. The methods provide, for example, multiplex genome editing in a cell without significant cellular side effects. The methods also provide delivering multiple genome editing tools to a cell in fewer steps, allowing for multi-editing within a shorter time period.

[0033] In some embodiments, the platform relates to manufacturing methods to prepare cells in vitro for subsequent therapeutic administration to a subject. In some embodiments, the platform relates to multiplex genome editing via simultaneous or sequential administration of lipid nanoparticles (LNPs) comprising at least two genome editing tools. The platform is relevant to any cell type but is particularly advantageous in preparing cells that require multiple genome edits for full therapeutic applicability, e.g., in primary immune cells. The methods may exhibit improved properties as compared to prior delivery technologies; for example, the methods provide efficient delivery of nucleic acids such as the at least two genome editing tools, while providing greater survival and expansion of the cells. As provided herein, the platform methods apply to “a cell” or to “a cell population” (or “population of cells”). When referring to delivery or gene editing methods for “a cell” herein, it is understood that the methods may be used for delivery or gene editing to “a cell population.”

[0034] In some embodiments, provided herein is a method of genetically modifying a cell, comprising: (a) contacting the cell with a first genome editing tool, wherein the first genome editing tool comprises a first genomic editor and at least one guide RNA (gRNA) that targets at least one genomic locus and that is cognate to the first genomic editor; and (b) contacting the cell with a second genome editing tool, wherein the second genome editing tool comprises a second genomic editor and at least one gRNA that targets at least one genomic locus and that is cognate to the second genomic editor, wherein the first genomic editor is orthogonal to the second genomic editor, thereby producing at least two genome edits in the cell.

[0035] In some embodiments, provided herein is a method of genetically modifying a cell, comprising: (a) contacting the cell with a first genome editing tool comprising a first genomic editor comprising a base editor, and at least one guide RNA (gRNA) that targets at least one genomic locus and that is cognate to the base editor; and (b) contacting the cell with a second genome editing tool comprising a second genomic editor comprising an RNA-guided cleavase, and at least one gRNA that targets at least one genomic locus and that is cognate to the RNA-guided cleavase, wherein the base editor is orthogonal to the RNA-guided cleavase, thereby producing at least two genome edits in the cell.

[0036] In some embodiments, provided herein is a method of producing a population of cells comprising edited cells, comprising: (a) contacting the cell with a first genome editing tool comprising a first genomic editor comprising a base editor and at least one guide RNA (gRNA) that targets at least one genomic locus and that is cognate to the base editor; (b) contacting the cell with a second genome editing tool comprising a second genomic editor comprising an RNA-guided cleavase and at least one gRNA that targets at least one genomic locus and that is cognate to the RNA-guided cleavase, wherein the base editor is orthogonal to the RNA-guided cleavase; and (c) culturing the cell, thereby producing the population of cells comprising edited cells comprising at least two genome edits per cell.

[0037] In some embodiments, provided herein is a composition, comprising: (a) a first genome editing tool, wherein the first genome editing tool comprises a first genomic editor, and at least one guide RNA (gRNA) that targets at least one genomic locus and that is cognate to the first genomic editor; and (b) a second genome editing tool, wherein the second genome editing tool comprises a second genomic editor, and at least one gRNA that targets at least one genomic locus and that is cognate to the second genomic editor, wherein the first genomic editor is orthogonal to the second genomic editor.

[0038] In some embodiments, provided herein is a composition, comprising: (a) a first genome editing tool, wherein the first genome editing tool comprises a first genomic editor comprising a base editor, and at least one guide RNA (gRNA) that targets at least one genomic locus and that is cognate to the base editor; and (b) a second genome editing tool comprising a second genomic editor comprising an RNA-guided cleavase, and at least one gRNA that targets at least one genomic locus and that is cognate to the RNA-guided cleavase, wherein the base editor is orthogonal to the RNA-guided cleavase.

[0039] In some embodiments, provided herein is a cell treated in vitro with any method or composition disclosed herein. In some embodiments, provided herein is a cell treated in vivo with any method or composition disclosed herein. In some embodiments, provided herein is a population of cells comprising any cell disclosed herein.

[0040] In some embodiments, provided herein is use of any cell, population of cells, or composition disclosed herein for treating cancer. In some embodiments, provided herein is use of any cell, population of cells, or composition disclosed herein for preparation of a medicament for treating cancer.

[0041] In some embodiments, provided herein is an engineered cell comprising at least three base edits in at least three genomic loci, and at least one exogenous gene.

[0042] In some embodiments, provided herein is a composition comprising: a. a gRNA comprising a guide sequence chosen from: i) SEQ ID NOs: 251-264; ii) at least 17, 18, 19, or 20 contiguous nucleotides of a sequence selected from SEQ ID NOs: 251-264; iii) a guide sequence at least 95%, 90%, or 85% identical to a sequence selected from SEQ ID NOs: 251-264; iv) a sequence that comprises 10 contiguous nucleotides±10 nucleotides of a genomic coordinate listed in Table 5; v) at least 17, 18, 19, or 20 contiguous nucleotides of a sequence from (iv); or vi) a guide sequence that is at least 95%, 90%, or 85% identical to a sequence selected from (v); or b. a nucleic acid encoding a gRNA of (a.).

[0043] In some embodiments, provided herein is a method of altering a DNA sequence within an AAVS1 gene, comprising delivering to a cell: a. a gRNA comprising a guide sequence chosen from: i) SEQ ID NOs: 251-264; ii) at least 17, 18, 19, or 20 contiguous nucleotides of a sequence selected from SEQ ID NOs: 251-264; iii) a guide sequence at least 95%, 90%, or 85% identical to a sequence selected from SEQ ID NOs: 251-264; iv) a sequence that comprises 10 contiguous nucleotides±10 nucleotides of a genomic coordinate listed in Table 5; v) at least 17, 18, 19, or 20 contiguous nucleotides of a sequence from (iv); or vi) a guide sequence that is at least 95%, 90%, or 85% identical to a sequence selected from (v); or b. a nucleic acid encoding a gRNA of (a.).

[0044] In some embodiments, provided herein is method of immunotherapy comprising administering a composition comprising an engineered cell to a subject, wherein the cell comprises a genomic modification in the AAVS1 gene, wherein the genetic modification comprises an insertion within the genomic coordinates selected from: chr19:55115695-55115715; chr19:55115588-55115608; chr19:55115616-55115636; chr19:55115623-55115643; chr19:55115637-55115657; chr19:55115691-55115711; chr19:55115755-55115775; chr19:55115823-55115843; chr19:55115834-55115854; chr19:55115835-55115855; chr19:55115836-55115856; chr19:55115850-55115870; chr19:55115951-55115971; and chr19:55115949-55115969; or wherein the cell is engineered by delivering to the cell: a. a gRNA comprising a guide sequence chosen from: i) SEQ ID NOs: 251-264; ii) at least 17, 18, 19, or 20 contiguous nucleotides of a sequence selected from SEQ ID NOs: 251-264; iii) a guide sequence at least 95%, 90%, or 85% identical to a sequence selected from SEQ ID NOs: 251-264; iv) a sequence that comprises 10 contiguous nucleotides±10 nucleotides of a genomic coordinate listed in Table 5; v) at least 17, 18, 19, or 20 contiguous nucleotides of a sequence from (iv); or vi) a guide sequence that is at least 95%, 90%, or 85% identical to a sequence selected from (v); or b. a nucleic acid encoding a gRNA of (a.).

[0045] In some embodiments, provided herein is an engineered cell comprising a genetic modification in the AAVS1 gene, wherein the genetic modification comprises an insertion within the genomic coordinates chosen from: chr19:55115695-55115715; chr19:55115588-55115608; chr19:55115616-55115636; chr19:55115623-55115643; chr19:55115637-55115657; chr19:55115691-55115711; chr19:55115755-55115775; chr19:55115823-55115843; chr19:55115834-55115854; chr19:55115835-55115855; chr19:55115836-55115856; chr19:55115850-55115870; chr19:55115951-55115971; and chr19:55115949-55115969.

[0046] Provided herein are the following numbered embodiments:

Embodiment 1 is a method of genetically modifying a cell, comprising:
[0047] (a) contacting the cell with a first genome editing tool, wherein the first genome editing tool comprises a first genomic editor and at least one guide RNA (gRNA) that targets at least one genomic locus and that is cognate to the first genomic editor; and
[0048] (b) contacting the cell with a second genome editing tool, wherein the second genome editing tool comprises a second genomic editor and at least one gRNA that targets at least one genomic locus and that is cognate to the second genomic editor, wherein the first genomic editor is orthogonal to the second genomic editor,
[0049] thereby producing at least two genome edits in the cell.
   Embodiment 2 is the method of embodiment 1, wherein the first genomic editor or the second genomic editor is delivered to the cell as at least one polypeptide or at least one polynucleotide that encodes the polypeptide.
   Embodiment 3 is the method of embodiment 2, wherein the at least one polynucleotide is at least one mRNA.
   Embodiment 4 is the method of any one of embodiments 1-3, wherein the at least one gRNA is delivered to the cell as at least one polynucleotide that encodes the gRNA.
   Embodiment 5 is the method of any one of embodiments 1-4, wherein the first genomic editor comprises a cleavase, a nickase, a catalytically inactive nuclease, a base editor, optionally a C to T base editor or an A to G base editor, or a fusion protein comprising a DNA polymerase and a nickase.
   Embodiment 6 is the method of any one of embodiments 1-5, wherein the second genomic editor comprises a cleavase, a nickase, a catalytically inactive nuclease, a base editor, optionally a C to T base editor or an A to G base editor, or a fusion protein comprising a DNA polymerase and a nickase.
   Embodiment 7 is the method of any one of embodiments 1-6, wherein one of the first genomic editor and the second genomic editor comprises a base editor, optionally a C to T base editor or an A to G base editor, and the other of the first genomic editor and the second genomic editor comprises a cleavase.
   Embodiment 8 is the method of embodiment 7, further comprising contacting the cell with a nucleic acid encoding an exogenous gene.
   Embodiment 9 is the method of any one of embodiments 1-6, wherein one of the first genomic editor and the second genomic editor comprises a C to T base editor, and the other of the first genomic editor and the second genomic editor comprises an A to G base editor.
   Embodiment 10 is the method of any one of embodiments 1-9, wherein one of the first genomic editor and second genomic editor comprises an N. meningitidis (Nine) RNA-guided nickase or cleavase, and the other of the first genomic editor and the second genomic editor comprises an S. pyogenes (Spy) RNA-guided nickase or cleavase.
   Embodiment 11 is the method of any one of embodiments 1-10, wherein the first genomic editor or the second genomic editor comprises a Cas nuclease.
   Embodiment 12 is the method of embodiment 11, wherein the Cas nuclease is a Class 2 Cas nuclease.
   Embodiment 13 is the method of embodiment 11, wherein the Cas nuclease is a Cas9.
   Embodiment 14 is the method of embodiment 13, wherein the Cas9 is S. pyogenes Cas9 (SpyCas9), S. aureus Cas9 (SauCas9), C. diphtheriae Cas9 (CdiCas9), Streptococcus thermophilus Cas9 (St1Cas9), A. cellulolyticus Cas9 (AceCas9), C. jejuni Cas9 (CjeCas9). R. palustris Cas9 (RpaCas9), R. rubrum Cas9 (RruCas9), A. naeslundii Cas9 (AnaCas9), Francisella novicida Cas9 (FnoCas9), or N. meningitidis (NmeCas9).
   Embodiment 15 is the method of embodiment 13 or embodiment 14, wherein the Cas9 is an Nme1Cas9, an Nme2Cas9, an Nme3Cas9, or SpyCas9.
   Embodiment 16 is a method of genetically modifying a cell, comprising:
[0050] (a) contacting the cell with a first genome editing tool comprising a first genomic editor comprising a base editor, and at least one guide RNA (gRNA) that targets at least one genomic locus and that is cognate to the base editor; and
[0051] (b) contacting the cell with a second genome editing tool comprising a second genomic editor comprising an RNA-guided cleavase, and at least one gRNA that targets at least one genomic locus and that is cognate to the RNA-guided cleavase, wherein the base editor is orthogonal to the RNA-guided cleavase,
[0052] thereby producing at least two genome edits in the cell.
   Embodiment 17 is a method of producing a population of cells comprising edited cells, comprising:
[0053] (a) contacting the cell with a first genome editing tool comprising a first genomic editor comprising a base editor and at least one guide RNA (gRNA) that targets at least one genomic locus and that is cognate to the base editor;
[0054] (b) contacting the cell with a second genome editing tool comprising a second genomic editor comprising an RNA-guided cleavase and at least one gRNA that targets at least one genomic locus and that is cognate to the RNA-guided cleavase, wherein the base editor is orthogonal to the RNA-guided cleavase; and
[0055] (c) culturing the cell, thereby producing the population of cells comprising edited cells comprising at least two genome edits per cell.
   Embodiment 18 is the method of embodiment 16 or 17, wherein the base editor is a C to T base editor, optionally comprising a cytidine deaminase, or is an A to G base editor, optionally comprising an adenosine deaminase.
   Embodiment 19 is the method of any one of embodiments 1-18, wherein one of the at least two genome edits comprises a double-stranded break, and another one of the at least two genome edits comprises a transition (e.g., A to G or C to T) Embodiment 20 is the method of any one of embodiments 1-19, wherein the first genome editing tool or the second genome editing tool is delivered to the cell via electroporation.
   Embodiment 21 is the method of any one of embodiments 1-20, wherein the first genome editing tool or the second genome editing tool is delivered to the cell via at least one lipid nanoparticle (LNP).
   Embodiment 22 is the method of any one of embodiments 1-21, wherein the first genome editing tool or the second genome editing tool is delivered to the cell on at least one vector.
   Embodiment 23 is the method of any one of embodiments 1-22, wherein the first genome editing tool or the second genome editing tool is delivered as at least one nucleic acid encoding the first genome editing tool or the second genome editing tool.
   Embodiment 24 is the method of embodiment 23, wherein the at least one nucleic acid comprises at least one mRNA.
   Embodiment 25 is the method of embodiments 1-24, wherein step (a) and step (b) are performed simultaneously.
   Embodiment 26 is the method of any one of embodiments 1-25, wherein step (a) and step (b) are performed in any order over a time period of about 5 minutes, 10 minutes, 15 minutes, 30 minutes, 1 hour, 2 hours, 3 hours, 4 hours, 5 hours, 6 hours, 7 hours, 8 hours, 9 hours, 10 hours, 11 hours, 12 hours, 13 hours, 14 hours, 15 hours, 16 hours, 17 hours, 18 hours, 19 hours, 20 hours, 21 hours, 22 hours, 23 hours, or 24 hours.
   Embodiment 27 is the method of any one of embodiments 1-26, wherein each of step (a) and step (b) is independently performed over a time period of about 5 minutes, 10 minutes, 15 minutes, 30 minutes, 1 hour, 2 hours, 3 hours, 4 hours, 5 hours, 6 hours, 7 hours, 8 hours, 9 hours, 10 hours, 11 hours, 12 hours, 13 hours, 14 hours, 15 hours, 16 hours, 17 hours, 18 hours, 19 hours, 20 hours, 21 hours, 22 hours, 23 hours, or 24 hours.
   Embodiment 28 is the method of any one of embodiments 16-27, wherein the first genome editing tool comprises a uracil glycosylase inhibitor (UGI), and the UGI and the base editor are comprised in a single polypeptide.
   Embodiment 29 is the method of any one of embodiments 16-27, wherein the first genome editing tool comprises a uracil glycosylase inhibitor (UGI), and the UGI and the base editor are comprised in different polypeptides.
   Embodiment 30 is the method of embodiment 28 or 29, wherein the base editor comprises a cytidine deaminase and an RNA-guided nickase.
   Embodiment 31 is the method of embodiment 30, wherein the cytidine deaminase, the RNA-guided nickase, and the UGI are comprised in a single polypeptide.
   Embodiment 32 is the method of embodiment 30, wherein the cytidine deaminase, the RNA-guided nickase, and the UGI are comprised in different polypeptides.
   Embodiment 33 is the method of embodiment 30, wherein the cytidine deaminase and the RNA-guided nickase are comprised in a single polypeptide, and wherein the UGI is comprised in a different polypeptide.
   Embodiment 34 is the method of any one of embodiments 1-33, wherein the first genomic editor comprises an amino acid sequence that is at least 80%, 85%, 90%, 95%, 98%, or 100% identical to SEQ ID NO: 3, 146, or 311.
   Embodiment 35 is the method of any one of embodiments 1-34, wherein the first genomic editor is delivered to the cell as a nucleic acid comprising a nucleotide sequence that is at least 80%, 85%, 90%, 95%, 98%, or 100% identical to SEQ ID NO: 1, and the second genomic editor is delivered to the cell as a nucleic acid comprising a nucleotide sequence that is at least 80%, 85%, 90%, 95%, 98%, or 100% identical to any one of SEQ ID NOs: 180-190.
   Embodiment 36 is the method of any one of embodiments 1-35, wherein the first genomic editor is delivered to the cell as a nucleic acid comprising a nucleotide sequence that is at least 80%, 85%, 90%, 95%, 98%, or 100% identical to SEQ ID NO: 147 or 310, and the second genomic editor is delivered to the cell as a nucleic acid comprising a nucleotide sequence that is at least 80%, 85%, 90%, 95%, 98%, or 100% identical to SEQ ID NO: 293 or 295.
   Embodiment 37 is the method of any one of embodiments 1-33, wherein the first genomic editor or the base editor comprises an amino acid sequence that is at least 80%, 85%, 90%, 95%, 98%, or 100% identical to any one of SEQ ID NOs: 9, 12, 18, and 21.
   Embodiment 38 is the method of any one of embodiments 1-37, wherein the first genomic editor or the base editor comprises a cytidine deaminase, and wherein the cytidine deaminase comprises an amino acid sequence that is at least 80%, 85%, 87%, 90%, 95%, 98%, 99%, or 100% identical to SEQ ID NO: 22.
   Embodiment 39 is the method of embodiment 38, wherein the cytidine deaminase comprises an APOBEC3A deaminase (A3A).
   Embodiment 40 is the method of embodiment 39, wherein the A3A comprises the amino acid sequence of SEQ ID NO: 22 or an amino acid sequence that is at least 87%, 90%, 95%, 98%, or 99% identical to SEQ ID NO: 22.
   Embodiment 41 is the method of embodiment 39 or 40, wherein the A3A is a human A3A.
   Embodiment 42 is the method of any one of embodiments 39-41, wherein the A3A is a wild-type A3A.
   Embodiment 43 is the method of any one of embodiments 1-42, wherein the first genomic editor or the base editor comprises a Cas9 nickase.
   Embodiment 44 is the method of any one of embodiments 1-43, wherein the first genomic editor or the base editor comprises an N. meningitidis (Nine) Cas9 nickase.
   Embodiment 45 is the method of any one of embodiments 1-44, wherein the first genomic editor or the base editor comprises a D16A NmeCas9 nickase, optionally a D16A Nme2Cas9.
   Embodiment 46 is the method of any one of embodiments 1-45, wherein the first genomic editor or the base editor comprises the amino acid sequence of SEQ ID NO: 149.
   Embodiment 47 is the method of any one of embodiments 1-46, wherein the first genomic editor or the base editor comprises a sequence that is at least 80%, 85%, 90%, 95%, 98%, 99% or 100% identical to the amino acid sequence of SEQ ID NO: 146.
   Embodiment 48 is the method of any one of embodiments 1-47, wherein the second genomic editor or the RNA-guided cleavase comprises a Cas9 cleavase.
   Embodiment 49 is the method of any one of embodiments 1-48, wherein the second genomic editor or the RNA-guided cleavase comprises an S. pyogenes (Spy) Cas9 cleavase.
   Embodiment 50 is the method of any one of embodiments 1-49, wherein the second genomic editor or the RNA-guided cleavase comprises an amino acid sequence that is at least 90% identical to SEQ ID NO: 156.
   Embodiment 51 is the method of any one of embodiments 1-50, wherein the second genomic editor or the RNA-guided cleavase comprises the amino acid sequence of SEQ ID NO: 156.
   Embodiment 52 is the method of any one of embodiments 1-43, wherein the first genomic editor or the base editor comprises an S. pyogenes (Spy) Cas9 nickase.
   Embodiment 53 is the method of any one of embodiments 1-43 and 52, wherein the first genomic editor or the base editor comprises a D10A SpyCas9 nickase.
   Embodiment 54 is the method of any one of embodiments 1-43, 52, and 53, wherein the first genomic editor or the base editor comprises the amino acid sequence of any one of SEQ ID NOs: 41, 43, and 45 or an amino acid sequence having at least 80%, 90%, 95%, 98%, or 99% identity to any one of SEQ ID NOs: 41, 43, and 45.
   Embodiment 55 is the method of any one of embodiments 1-43 and 52-54, wherein the first genomic editor or the base editor is delivered to the cell as a nucleic acid comprising the nucleotide sequence of any one of SEQ ID NOs: 42, 44, and 46 or a nucleotide sequence having at least 80%, 90%, 95%, 98%, or 99% identity to any one of SEQ ID NOs: 42, 44, and 46.
   Embodiment 56 is the method of any one of embodiments 1-43 and 52-54, wherein the first genomic editor or the base editor is delivered to the cell as a nucleic acid comprising the nucleotide sequence of any one of SEQ ID NOs: 42, 44, and 46-58.
   Embodiment 57 is the method of any one of embodiments 1-43 and 52-54, wherein the first genomic editor or the base editor is delivered to the cell as a nucleic acid comprising a nucleotide sequence that is at least 80%, 85%, 90%, 95%, 98% or 100% identical to SEQ ID NO: 1.
   Embodiment 58 is the method of any one of embodiments 1-43 and 52-54, wherein the first genomic editor or the base editor is delivered to the cell as a nucleic acid comprising a nucleotide sequence that is at least 80%, 85%, 90%, 95%, 98% or 100% identical to SEQ ID NO: 4.
   Embodiment 59 is the method of any one of embodiments 1-43 and 52-56, wherein the first genomic editor or the base editor comprises an amino acid sequence that is at least 80%, 85%, 90%, 95%, 98% or 100% identical to SEQ ID NO: 148.
   Embodiment 60 is the method of any one of embodiments 1-43 and 52-59, wherein the second genomic editor or the RNA-guided cleavase comprises an N. meningitidis (Nine) Cas9 cleavase.
   Embodiment 61 is the method of any one of embodiments 1-43 and 52-60, wherein the second genomic editor or the RNA-guided cleavase comprises an amino acid sequence that is at least 90%, 91%, 92%, 93%, 94%, 95%, 96%, 97%, 98%, or 99% identical to any one of SEQ ID NOs: 157-167, 191, 198, 205, 212, and 219.
   Embodiment 62 is the method of any one of embodiments 1-43 and 52-61, wherein the second genomic editor or the RNA-guided cleavase comprises the amino acid sequence of any one of SEQ ID NOs: 157-167, 191, 198, 205, 212, and 219.
   Embodiment 63 is the method of any one of embodiments 1-43 and 52-61, wherein the second genomic editor or the RNA-guided cleavase is delivered to the cell as a nucleic acid comprising a nucleotide sequence that is at least 90%, 91%, 92%, 93%, 94%, 95%, 96%, 97%, 98%, or 99% identical to any one of SEQ ID NOs: 168-190, 192-197, 199-204, 206-211, 213-218, and 220-225.
   Embodiment 64 is the method of any one of embodiments 1-43 and 52-61, wherein the second genomic editor or the RNA-guided cleavase is delivered to the cell as a nucleic acid comprising a nucleotide sequence of any one of SEQ ID NOs: 168-190, 192-197, 199-204, 206-211, 213-218, and 220-225.
   Embodiment 65 is the method of any one of embodiments 1-64, wherein at least one gRNA that is cognate to the first genomic editor or the base editor is non-cognate to the second genomic editor or the RNA-guided cleavase.
   Embodiment 66 is the method of any one of embodiments 1-65, wherein at least one gRNA that is cognate to the second genomic editor or the RNA-guided cleavase is non-cognate to the first genomic editor or the base editor.
   Embodiment 67 is the method of any one of embodiments 1-66, wherein the at least one gRNA comprises at least one single guide RNA (sgRNA).
   Embodiment 68 is the method of embodiment 67, wherein the at least one sgRNA comprises a short-single guide RNA (short-sgRNA) comprising a conserved portion of an sgRNA comprising a hairpin region, wherein the hairpin region lacks at least 5-10 nucleotides and wherein the short-sgRNA comprises a 5′ end modification or a 3′ end modification or both.
   Embodiment 69 is the method of any one of embodiments 1-68, wherein the at least one gRNA that is cognate to the first genomic editor or the base editor comprises at least two gRNAs that target at least two different genomic loci.
   Embodiment 70 is the method of any one of embodiments 1-69, wherein the at least one gRNA that is cognate to the second genomic editor or the RNA-guided cleavase comprises at least two gRNAs that target at least two different genomic loci.
   Embodiment 71 is the method of any one of embodiments 1-70, wherein the at least one gRNA that is cognate to the first genomic editor or the base editor comprises at least three gRNAs that target at least three different genomic loci.
   Embodiment 72 is the method of any one of embodiments 1-71, wherein the at least one gRNA that is cognate to the second genomic editor or the RNA-guided cleavase comprises at least three gRNAs that target at least three different genomic loci.
   Embodiment 73 is the method of any one of embodiments 1-72, wherein the at least one gRNA that is cognate to the first genomic editor or the base editor comprises at least four gRNAs that target at least four different genomic loci.
   Embodiment 74 is the method of any one of embodiments 1-73, wherein the at least one gRNA that is cognate to the second genomic editor or the RNA-guided cleavase comprises at least four gRNAs that target at least four different genomic loci.
   Embodiment 75 is the method of any one of embodiments 1-74, wherein the at least one gRNA that is cognate to the first genomic editor or the base editor comprises at least five gRNAs that target at least five different genomic loci.
   Embodiment 76 is the method of any one of embodiments 1-75, wherein the at least one gRNA that is cognate to the second genomic editor or the RNA-guided cleavase comprises at least five gRNAs that target at least five different genomic loci.
   Embodiment 77 is the method of any one of embodiments 1-76, wherein the at least one gRNA that is cognate to the first genomic editor or the base editor comprises at least six gRNAs that target at least six different genomic loci.
   Embodiment 78 is the method of any one of embodiments 1-77, wherein the at least one gRNA that is cognate to the second genomic editor or the RNA-guided cleavase comprises at least six gRNAs that target at least six different genomic loci.
   Embodiment 79 is the method of any one of embodiments 1-78, wherein the at least one gRNA that is cognate to the first genomic editor or the base editor targets one or more genomic loci chosen from the TRBC locus, the HLA-A locus, the HLA-B locus, the CIITA locus, the HLA-DR locus, the HLA-DQ locus, and the HLA-DP locus.
   Embodiment 80 is the method of any one of embodiments 1-79, wherein the at least one gRNA that is cognate to the second genomic editor or the RNA-guided cleavase targets one or more genomic loci chosen from the TRAC locus, the AAVS1 locus, and the CIITA locus.
   Embodiment 81 is the method of any one of embodiments 1-80, wherein
[0056] (i) the at least one gRNA that is cognate to the first genomic editor or the base editor comprises a gRNA that targets the HLA-A locus and a gRNA that targets the CIITA locus, and the at least one gRNA that is cognate to the second genomic editor or the RNA-guided cleavase comprises a gRNA that targets the TRAC locus;
[0057] (ii) the at least one gRNA that is cognate to the first genomic editor or the base editor comprises a gRNA that targets the TRBC locus, a gRNA that targets the HLA-A locus, and a gRNA that targets the CIITA locus, and the at least one gRNA that is cognate to the second genomic editor or the RNA-guided cleavase comprises a gRNA that targets the TRAC locus;
[0058] (iii) the at least one gRNA that is cognate to the first genomic editor or the base editor comprises a gRNA that targets the HLA-A locus, a gRNA that targets the HLA-B locus, and a gRNA that targets the CIITA locus, and the at least one gRNA that is cognate to the second genomic editor or the RNA-guided cleavase comprises a gRNA that targets the TRAC locus;
[0059] (iv) the at least one gRNA that is cognate to the first genomic editor or the base editor comprises a gRNA that targets the TRBC locus, a gRNA that targets the HLA-A locus, a gRNA that targets the HLA-B locus, and a gRNA that targets the CIITA locus, and the at least one gRNA that is cognate to the second genomic editor or the RNA-guided cleavase comprises a gRNA that targets the TRAC locus;
[0060] (v) the at least one gRNA that is cognate to the first genomic editor or the base editor comprises a gRNA that targets the HLA-A locus and a gRNA that targets the HLA-DR locus, the HLA-DQ locus, or the HLA-DP locus, and the at least one gRNA that is cognate to the second genomic editor or the RNA-guided cleavase comprises a gRNA that targets the TRAC locus;
[0061] (vi) the at least one gRNA that is cognate to the first genomic editor or the base editor comprises a gRNA that targets the TRBC locus, a gRNA that targets the HLA-A locus, and a gRNA that targets the HLA-DR locus, the HLA-DQ locus, or the HLA-DP locus, and the at least one gRNA that is cognate to the second genomic editor or the RNA-guided cleavase comprises a gRNA that targets the TRAC locus;
[0062] (vii) the at least one gRNA that is cognate to the first genomic editor or the base editor comprises a gRNA that targets the HLA-A locus, a gRNA that targets the HLA-B locus, and a gRNA that targets the HLA-DR locus, the HLA-DQ locus, or the HLA-DP locus, and the at least one gRNA that is cognate to the second genomic editor or the RNA-guided cleavase comprises a gRNA that targets the TRAC locus;
[0063] (viii) the at least one gRNA that is cognate to the first genomic editor or the base editor comprises a gRNA that targets the TRBC locus, a gRNA that targets the HLA-A locus, a gRNA that targets the HLA-B locus, and a gRNA that targets the HLA-DR locus, the HLA-DQ locus, or the HLA-DP locus, and the at least one gRNA that is cognate to the second genomic editor or the RNA-guided cleavase comprises a gRNA that targets the TRAC locus;
[0064] (ix) the at least one gRNA that is cognate to the first genomic editor or the base editor comprises a gRNA that targets the TRAC locus, a gRNA that targets the TRBC locus, a gRNA that targets the CIITA locus, and a gRNA that targets the HLA-A locus, and the at least one gRNA that is cognate to the second genomic editor or the RNA-guided cleavase comprises a gRNA that targets the TRAC locus;
[0065] (x) the at least one gRNA that is cognate to the first genomic editor or the base editor comprises a gRNA that targets the TRBC locus, a gRNA that targets the HLA-A locus, and a gRNA that targets the CIITA locus, and the at least one gRNA that is cognate to the second genomic editor or the RNA-guided cleavase comprises a gRNA that targets the AAVS1 locus;
[0066] (xi) the at least one gRNA that is cognate to the first genomic editor or the base editor comprises a gRNA that targets the TRBC locus, a gRNA that targets the HLA-A locus, a gRNA that targets the HLA-B locus, and a gRNA that targets the CIITA locus, and the at least one gRNA that is cognate to the second genomic editor or the RNA-guided cleavase comprises a gRNA that targets the AAVS1 locus;
[0067] (xii) the at least one gRNA that is cognate to the first genomic editor or the base editor comprises a gRNA that targets the TRBC locus, a gRNA that targets the HLA-A locus, and a gRNA that targets the HLA-DR locus, the HLA-DQ locus, or the HLA-DP locus, and the at least one gRNA that is cognate to the second genomic editor or the RNA-guided cleavase comprises a gRNA that targets the AAVS1 locus; or
[0068] (xiii) the at least one gRNA that is cognate to the first genomic editor or the base editor comprises a gRNA that targets the TRBC locus, a gRNA that targets the HLA-A locus, a gRNA that targets the HLA-B locus, and a gRNA that targets the HLA-DR locus, the HLA-DQ locus, or the HLA-DP locus, and the at least one gRNA that is cognate to the second genomic editor or the RNA-guided cleavase comprises a gRNA that targets the AAVS1 locus.
   Embodiment 82 is the method of any one of embodiments 1-81, further comprising contacting the cell with a nucleic acid encoding an exogenous gene for insertion into the TRAC or AAVS1 locus.
   Embodiment 83 is the method of embodiment 82, wherein in any one of subparts (i)-(ix), the at least one gRNA that is cognate to the second genomic editor or the RNA-guided cleavase comprises a further gRNA that targets the AAVS1 locus.
   Embodiment 84 is the method of embodiment 82, wherein in any one of subparts (x)-(xiii), the at least one gRNA that is cognate to the second genomic editor or the RNA-guided cleavase comprises a further gRNA that targets the TRAC locus.
   Embodiment 85 is the method of embodiment 84, wherein the cell is contacted with the further gRNA that targets the AAVS1 locus after the cell is contacted with the gRNA that targets the TRAC locus.
   Embodiment 86 is the method of embodiment 85, wherein the cell is contacted with the further gRNA that targets the TRAC locus after the cell is contacted with the gRNA that targets the AAVS1 locus.
   Embodiment 87 is a composition, comprising:
[0069] (a) a first genome editing tool, wherein the first genome editing tool comprises a first genomic editor, and at least one guide RNA (gRNA) that targets at least one genomic locus and that is cognate to the first genomic editor; and
[0070] (b) a second genome editing tool, wherein the second genome editing tool comprises a second genomic editor, and at least one gRNA that targets at least one genomic locus and that is cognate to the second genomic editor, wherein the first genomic editor is orthogonal to the second genomic editor.
   Embodiment 88 is the composition of embodiment 87, wherein the first genomic editor or the second genomic editor comprises at least one polypeptide or at least one mRNA.
   Embodiment 89 is the composition of embodiment 87 or 88, wherein the at least one gRNA comprises at least one polynucleotide that encodes the gRNA.
   Embodiment 90 is the composition of any one of embodiments 87-89, wherein the first genomic editor comprises a cleavase, a nickase, a catalytically inactive nuclease, a base editor, optionally a C to T base editor or an A to G base editor, or a fusion protein comprising a DNA polymerase and a nickase.
   Embodiment 91 is the composition of any one of embodiments 87-90, wherein the second genomic editor comprises a cleavase, a nickase, a catalytically inactive nuclease, a base editor, optionally a C to T base editor or an A to G base editor, or a fusion protein comprising a DNA polymerase and a nickase.
   Embodiment 92 is the composition of any one of embodiments 87-91, wherein one of the first genomic editor and the second genomic editor comprises a base editor, optionally a C to T base editor or an A to G base editor, and the other of the first genomic editor and the second genomic editor comprises a cleavase.
   Embodiment 93 is the composition of embodiment 92, further comprising a nucleic acid encoding an exogenous gene.
   Embodiment 94 is the composition of any one of embodiments 87-91, wherein one of the first genomic editor and the second genomic editor comprises a C to T base editor, and the other of the first genomic editor and the second genomic editor comprises an A to G base editor.
   Embodiment 95 is the composition of any one of embodiments 87-94, wherein one of the first genomic editor and the second genomic editor comprises an N. meningitidis (Nine) RNA-guided nickase, and the other of the first genomic editor and the second genomic editor comprises an S. pyogenes (Spy) RNA-guided nickase.
   Embodiment 96 is the composition of any one of embodiments 87-95, wherein the first genomic editor or the second genomic editor is a Cas nuclease.
   Embodiment 97 is the composition of embodiment 96, wherein the Cas nuclease is a Class 2 Cas nuclease.
   Embodiment 98 is the composition of embodiment 96, wherein the Cas nuclease is a Cas9.
   Embodiment 99 is the composition of embodiment 98, wherein the Cas9 is S. pyogenes Cas9 (SpyCas9), S. aureus Cas9 (SauCas9), C. diphtheriae Cas9 (CdiCas9), Streptococcus thermophilus Cas9 (St1Cas9), A. cellulolyticus Cas9 (AceCas9), C. jejuni Cas9 (CjeCas9). R. palustris Cas9 (RpaCas9), R. rubrum Cas9 (RruCas9), A. naeslundii Cas9 (AnaCas9), Francisella novicida Cas9 (FnoCas9), or N. meningitidis (NmeCas9).
   Embodiment 100 is the composition of embodiment 98 or 99, wherein the Cas9 is an Nme1Cas9, an Nme2Cas9, an Nme3Cas9, or SpyCas9.
   Embodiment 101 is a composition, comprising:
[0071] (a) a first genome editing tool, wherein the first genome editing tool comprises a first genomic editor comprising a base editor, and at least one guide RNA (gRNA) that targets at least one genomic locus and that is cognate to the base editor; and
[0072] (b) a second genome editing tool comprising a second genomic editor comprising an RNA-guided cleavase, and at least one gRNA that targets at least one genomic locus and that is cognate to the RNA-guided cleavase, wherein the base editor is orthogonal to the RNA-guided cleavase.
   Embodiment 102 is the composition of embodiment 101, wherein the base editor is a C to T base editor, optionally comprising a cytidine deaminase, or is an A to G base editor, optionally comprising an adenosine deaminase.
   Embodiment 103 is the composition of any one of embodiments 87-102, wherein the first genome editing tool or the second genome editing tool is delivered to a cell via electroporation.
   Embodiment 104 is the composition of any one of embodiments 87-103, wherein the first genome editing tool or the second genome editing tool is contained in at least one lipid nanoparticle (LNP).
   Embodiment 105 is the composition of any one of embodiments 87-104, wherein the first genome editing tool or the second genome editing tool comprises at least one vector.
   Embodiment 106 is the composition of any one of embodiments 87-105, wherein the first genome editing tool or the second genome editing tool comprises at least one polypeptide or at least one nucleic acid encoding the first genome editing tool or the second genome editing tool.
   Embodiment 107 is the composition of any one of embodiments 87-106, wherein the first genome editing tool comprises at least one polypeptide comprising the first genome editing tool or at least one nucleic acid encoding the first genome editing tool.
   Embodiment 108 is the composition of any one of embodiments 87-107, wherein the second genome editing tool comprises at least one polypeptide comprising the second genome editing tool or at least one nucleic acid encoding the second genome editing tool.
   Embodiment 109 is the composition of any one of embodiments 106-108, wherein the at least one nucleic acid comprises at least one mRNA.
   Embodiment 110 is the composition of any one of embodiments 101-109, wherein the first genome editing tool comprises a uracil glycosylase inhibitor (UGI), and the UGI and the base editor are comprised in a single polypeptide.
   Embodiment 111 is the composition of any one of embodiments 101-109, wherein the first genome editing tool comprises a uracil glycosylase inhibitor (UGI), and the UGI and the base editor are comprised in different polypeptides.
   Embodiment 112 is the composition of embodiment 110 or 111, wherein the base editor comprises a cytidine deaminase and an RNA-guided nickase.
   Embodiment 113 is the composition of embodiment 112, wherein the cytidine deaminase, the RNA-guided nickase, and the UGI are comprised in a single polypeptide.
   Embodiment 114 is the composition of embodiment 112, wherein the cytidine deaminase, the RNA-guided nickase, and the UGI are comprised in different polypeptides.
   Embodiment 115 is the composition of embodiment 112, wherein the cytidine deaminase and the RNA-guided nickase are comprised in a single polypeptide, and wherein the UGI is comprised in a different polypeptide.
   Embodiment 116 is the composition of any one of embodiments 87-115, wherein the first genomic editor comprises an amino acid sequence that is at least 80%, 85%, 90%, 95%, 98%, or 100% identical to SEQ ID NO: 3, 146, or 311.
   Embodiment 117 is the composition of any one of embodiments 87-116, wherein the first genomic editor is delivered to a cell as a nucleic acid comprising a nucleotide sequence that is at least 80%, 85%, 90%, 95%, 98%, or 100% identical to SEQ ID NO: 1, and the second genomic editor is delivered to a cell as a nucleic acid comprising a nucleotide sequence that is at least 80%, 85%, 90%, 95%, 98%, or 100% identical to any one of SEQ ID NOs: 180-190.
   Embodiment 118 is the composition of any one of embodiments 87-117, wherein the first genomic editor is delivered to a cell as a nucleic acid comprising a nucleotide sequence that is at least 80%, 85%, 90%, 95%, 98%, or 100% identical to SEQ ID NO: 147 or 310, and the second genomic editor is delivered to a cell as a nucleic acid comprising a nucleotide sequence that is at least 80%, 85%, 90%, 95%, 98%, or 100% identical to SEQ ID NO: 293 or 295.
   Embodiment 119 is the composition of any one of embodiments 87-115, wherein the first genomic editor or the base editor comprises an amino acid sequence that is at least 80%, 85%, 90%, 95%, 98%, or 100% identical to any one of SEQ ID NOs: 9, 12, 18, and 21.
   Embodiment 120 is the composition of any one of embodiments 87-119, wherein the first genomic editor or the base editor comprises a cytidine deaminase, and wherein the cytidine deaminase comprises an amino acid sequence that is at least 80%, 85%, 87%, 90%, 95%, 98%, 99%, or 100% identical to SEQ ID NO: 22.
   Embodiment 121 is the composition of embodiment 120, wherein the cytidine deaminase comprises an APOBEC3A deaminase (A3A).
   Embodiment 122 is the composition of embodiment 121, wherein the A3A comprises the amino acid sequence of SEQ ID NO: 22 or an amino acid sequence that is at least 87%, 90%, 95%, 98%, or 99% identical to SEQ ID NO: 22.
   Embodiment 123 is the composition of embodiment 121 or 122, wherein the A3A is a human A3A.
   Embodiment 124 is the composition of any one of embodiments 121-123, wherein the A3A is a wild-type A3A.
   Embodiment 125 is the composition of any one of embodiments 87-124, wherein the first genomic editor or the base editor comprises a Cas9 nickase.
   Embodiment 126 is the composition of any one of embodiments 87-125, wherein the first genomic editor or the base editor comprises an N. meningitidis (Nine) Cas9 nickase.
   Embodiment 127 is the composition of any one of embodiments 87-126, wherein the first genomic editor or the base editor comprises a D16A NmeCas9 nickase, optionally a D16A Nme2Cas9.
   Embodiment 128 is the composition of any one of embodiments 87-127, wherein the first genomic editor or the base editor comprises the amino acid sequence of SEQ ID NO: 149.
   Embodiment 129 is the composition of any one of embodiments 87-128, wherein the first genomic editor or the base editor comprises a sequence that is at least 80%, 85%, 90%, 95%, 98%, 99% or 100% identical to the amino acid sequence of SEQ ID NO: 146.
   Embodiment 130 is the composition of any one of embodiments 87-129, wherein the second genomic editor or the RNA-guided cleavase comprises a Cas9 cleavase.
   Embodiment 131 is the composition of any one of embodiments 87-130, wherein the second genomic editor or the RNA-guided cleavase comprises an S. pyogenes (Spy) Cas9 cleavase.
   Embodiment 132 is the composition of any one of embodiments 87-131, wherein the second genomic editor or the RNA-guided cleavase comprises an amino acid sequence that is at least 90% identical to SEQ ID NO: 156.
   Embodiment 133 is the composition of any one of embodiments 87-132, wherein the second genomic editor or the RNA-guided cleavase comprises the amino acid sequence of SEQ ID NO: 156.
   Embodiment 134 is the composition of any one of embodiments 87-125, wherein the first genomic editor or the base editor comprises an S. pyogenes (Spy) Cas9 nickase.
   Embodiment 135 is the composition of any one of embodiments 87-125 and 134, wherein the first genomic editor or the base editor comprises a D10A SpyCas9 nickase.
   Embodiment 136 is the composition of any one of embodiments 87-125, 134, and 135, wherein the first genomic editor or the base editor comprises the amino acid sequence of any one of SEQ ID NOs: 41, 43, and 45 or an amino acid sequence having at least 80%, 90%, 95%, 98%, or 99% identity to any one of SEQ ID NOs: 41, 43, and 45.
   Embodiment 137 is the composition of any one of embodiments 87-125 and 134-136, wherein the first genomic editor or the base editor is delivered to a cell as a nucleic acid comprising the nucleotide sequence of any one of SEQ ID NOs: 42, 44, and 46 or a nucleotide sequence having at least 80%, 90%, 95%, 98%, or 99% identity to any one of SEQ ID NOs: 42, 44, and 46.
   Embodiment 138 is the composition of any one of embodiments 87-125 and 134-137, wherein the first genomic editor or the base editor is delivered to a cell as a nucleic acid comprising the nucleotide sequence of any one of SEQ ID NOs: 42, 44, and 46-58.
   Embodiment 139 is the composition of any one of embodiments 87-125 and 134-138, wherein the first genomic editor or the base editor is delivered to a cell as a nucleic acid comprising a nucleotide sequence that is at least 80%, 85%, 90%, 95%, 98% or 100% identical to SEQ ID NO: 1.
   Embodiment 140 is the composition of any one of embodiments 87-125 and 134-138, wherein the first genomic editor or the base editor is delivered to a cell as a nucleic acid comprising a nucleotide sequence that is at least 80%, 85%, 90%, 95%, 98% or 100% identical to SEQ ID NO: 4.
   Embodiment 141 is the composition of any one of embodiments 87-125 and 134-138, wherein the first genomic editor or the base editor comprises an amino acid sequence that is at least 80%, 85%, 90%, 95%, 98% or 100% identical to SEQ ID NO: 148.
   Embodiment 142 is the composition of any one of embodiments 87-125 and 134-141, wherein the second genomic editor or the RNA-guided cleavase comprises an N. meningitidis (Nine) Cas9 cleavase.
   Embodiment 143 is the composition of any one of embodiments 87-125 and 134-142, wherein the second genomic editor or the RNA-guided cleavase comprises an amino acid sequence that is at least 90%, 91%, 92%, 93%, 94%, 95%, 96%, 97%, 98%, or 99% identical to any one of SEQ ID NOs: 157-167, 191, 198, 205, 212, and 219.
   Embodiment 144 is the composition of any one of embodiments 87-124 and 134-143, wherein the second genomic editor or the RNA-guided cleavase comprises the amino acid sequence of any one of SEQ ID NOs: 157-167, 191, 198, 205, 212, and 219.
   Embodiment 145 is the composition of any one of embodiments 87-124 and 134-144, wherein the second genomic editor or the RNA-guided cleavase is delivered to a cell as a nucleic acid comprising a nucleotide sequence that is at least 90%, 91%, 92%, 93%, 94%, 95%, 96%, 97%, 98%, or 99% identical to any one of SEQ ID NOs: 168-190, 192-197, 199-204, 206-211, 213-218, and 220-225.
   Embodiment 146 is the composition of any one of embodiments 87-124 and 134-144, wherein the second genomic editor or the RNA-guided cleavase is delivered to the cell as a nucleic acid comprising a nucleotide sequence of any one of SEQ ID NOs: 168-190, 192-197, 199-204, 206-211, 213-218, and 220-225.
   Embodiment 147 is the composition of any one of embodiments 87-146, wherein the at least one gRNA that is cognate to the first genomic editor or the base editor is non-cognate to the second genomic editor or the RNA-guided cleavase.
   Embodiment 148 is the composition of any one of embodiments 87-147, wherein the at least one gRNA that is cognate to the second genomic editor or the RNA-guided cleavase is non-cognate to the first genomic editor or the base editor.
   Embodiment 149 is the composition of any one of embodiments 87-148, wherein the at least one gRNA comprises at least one single guide RNA (sgRNA).
   Embodiment 150 is the composition of embodiment 149, wherein the at least one sgRNA comprises a short-single guide RNA (short-sgRNA) comprising a conserved portion of an sgRNA comprising a hairpin region, wherein the hairpin region lacks at least 5-10 nucleotides and wherein the short-sgRNA comprises a 5′ end modification or a 3′ end modification or both.
   Embodiment 151 is the composition of any one of embodiments 87-150, wherein the at least one gRNA that is cognate to the first genomic editor or the base editor comprises at least two gRNAs that target at least two different genomic loci.
   Embodiment 152 is the composition of any one of embodiments 87-151, wherein the at least one gRNA that is cognate to the second genomic editor or the RNA-guided cleavase comprises at least two gRNAs that target at least two different genomic loci.
   Embodiment 153 is the composition of any one of embodiments 87-152, wherein the at least one gRNA that is cognate to the first genomic editor or the base editor comprises at least three gRNAs that target at least three different genomic loci.
   Embodiment 154 is the composition of any one of embodiments 87-153, wherein the at least one gRNA that is cognate to the second genomic editor or the RNA-guided cleavase comprises at least three gRNAs that target at least three different genomic loci.
   Embodiment 155 is the composition of any one of embodiments 87-154, wherein the at least one gRNA that is cognate to the first genomic editor or the base editor comprises at least four gRNAs that target at least four different genomic loci.
   Embodiment 156 is the composition of any one of embodiments 87-155, wherein the at least one gRNA that is cognate to the second genomic editor or the RNA-guided cleavase comprises at least four gRNAs that target at least four different genomic loci.
   Embodiment 157 is the composition of any one of embodiments 87-156, wherein the at least one gRNA that is cognate to the first genomic editor or the base editor comprises at least five gRNAs that target at least five different genomic loci.
   Embodiment 158 is the composition of any one of embodiments 87-157, wherein the at least one gRNA that is cognate to the second genomic editor or the RNA-guided cleavase comprises at least five gRNAs that target at least five different genomic loci.
   Embodiment 159 is the composition of any one of embodiments 87-158, wherein the at least one gRNA that is cognate to the first genomic editor or the base editor comprises at least six gRNAs that target at least six different genomic loci.
   Embodiment 160 is the composition of any one of embodiments 87-159, wherein the at least one gRNA that is cognate to the second genomic editor or the RNA-guided cleavase comprises at least six gRNAs that target at least six different genomic loci.
   Embodiment 161 is the composition of any one of embodiments 151-160, wherein the first genomic editor and one, two, three, four, five, or six of the at least one gRNA that are cognate to the first genomic editor or the base editor and target different genomic loci are contained in a same lipid nanoparticle (LNP).
   Embodiment 162 is the composition of any one of embodiments 87-161, wherein the at least one gRNA that is cognate to the first genomic editor or the base editor targets one or more genomic loci chosen from the TRBC locus, the HLA-A locus, the HLA-B locus, the CIITA locus, the HLA-DR locus, the HLA-DQ locus, and the HLA-DP locus.
   Embodiment 163 is the composition of any one of embodiments 87-162, wherein the at least one gRNA that is cognate to the second genomic editor or the RNA-guided cleavase targets one or more genomic loci chosen from the TRAC locus, the AAVS1 locus, and the CIITA locus.
   Embodiment 164 is the composition of any one of the embodiments 87-163, wherein
[0073] (i) the at least one gRNA that is cognate to the first genomic editor or the base editor comprises a gRNA that targets the HLA-A locus and a gRNA that targets the CIITA locus, and the at least one gRNA that is cognate to the second genomic editor or the RNA-guided cleavase comprises a gRNA that targets the TRAC locus;
[0074] (ii) the at least one gRNA that is cognate to the first genomic editor or the base editor comprises a gRNA that targets the TRBC locus, a gRNA that targets the HLA-A locus, and a gRNA that targets the CIITA locus, and the at least one gRNA that is cognate to the second genomic editor or the RNA-guided cleavase comprises a gRNA that targets the TRAC locus;
[0075] (iii) the at least one gRNA that is cognate to the first genomic editor or the base editor comprises a gRNA that targets the HLA-A locus, a gRNA that targets the HLA-B locus, and a gRNA that targets the CIITA locus, and the at least one gRNA that is cognate to the second genomic editor or the RNA-guided cleavase comprises a gRNA that targets the TRAC locus;
[0076] (iv) the at least one gRNA that is cognate to the first genomic editor or the base editor comprises a gRNA that targets the TRBC locus, a gRNA that targets the HLA-A locus, a gRNA that targets the HLA-B locus, and a gRNA that targets the CIITA locus, and the at least one gRNA that is cognate to the second genomic editor or the RNA-guided cleavase comprises a gRNA that targets the TRAC locus;
[0077] (v) the at least one gRNA that is cognate to the first genomic editor or the base editor comprises a gRNA that targets the HLA-A locus and a gRNA that targets the HLA-DR locus, the HLA-DQ locus, or the HLA-DP locus, and the at least one gRNA that is cognate to the second genomic editor or the RNA-guided cleavase comprises a gRNA that targets the TRAC locus;
[0078] (vi) the at least one gRNA that is cognate to the first genomic editor or the base editor comprises a gRNA that targets the TRBC locus, a gRNA that targets the HLA-A locus, and a gRNA that targets the HLA-DR locus, the HLA-DQ locus, or the HLA-DP locus, and the at least one gRNA that is cognate to the second genomic editor or the RNA-guided cleavase comprises a gRNA that targets the TRAC locus;
[0079] (vii) the at least one gRNA that is cognate to the first genomic editor or the base editor comprises a gRNA that targets the HLA-A locus, a gRNA that targets the HLA-B locus, and a gRNA that targets the HLA-DR locus, the HLA-DQ locus, or the HLA-DP locus, and the at least one gRNA that is cognate to the second genomic editor or the RNA-guided cleavase comprises a gRNA that targets the TRAC locus;
[0080] (viii) the at least one gRNA that is cognate to the first genomic editor or the base editor comprises a gRNA that targets the TRBC locus, a gRNA that targets the HLA-A locus, a gRNA that targets the HLA-B locus, and a gRNA that targets the HLA-DR locus, the HLA-DQ locus, or the HLA-DP locus, and the at least one gRNA that is cognate to the second genomic editor or the RNA-guided cleavase comprises a gRNA that targets the TRAC locus;
[0081] (ix) the at least one gRNA that is cognate to the first genomic editor or the base editor comprises a gRNA that targets the TRAC locus, a gRNA that targets the TRBC locus, a gRNA that targets the CIITA locus, and a gRNA that targets the HLA-A locus, and the at least one gRNA that is cognate to the second genomic editor or the RNA-guided cleavase comprises a gRNA that targets the TRAC locus;
[0082] (x) the at least one gRNA that is cognate to the first genomic editor or the base editor comprises a gRNA that targets the TRBC locus, a gRNA that targets the HLA-A locus, and a gRNA that targets the CIITA locus, and the at least one gRNA that is cognate to the second genomic editor or the RNA-guided cleavase comprises a gRNA that targets the AAVS1 locus;
[0083] (xi) the at least one gRNA that is cognate to the first genomic editor or the base editor comprises a gRNA that targets the TRBC locus, a gRNA that targets the HLA-A locus, a gRNA that targets the HLA-B locus, and a gRNA that targets the CIITA locus, and the at least one gRNA that is cognate to the second genomic editor or the RNA-guided cleavase comprises a gRNA that targets the AAVS1 locus;
[0084] (xii) the at least one gRNA that is cognate to the first genomic editor or the base editor comprises a gRNA that targets the TRBC locus, a gRNA that targets the HLA-A locus, and a gRNA that targets the HLA-DR locus, the HLA-DQ locus, or the HLA-DP locus, and the at least one gRNA that is cognate to the second genomic editor or the RNA-guided cleavase comprises a gRNA that targets the AAVS1 locus; or
[0085] (xiii) the at least one gRNA that is cognate to the first genomic editor or the base editor comprises a gRNA that targets the TRBC locus, a gRNA that targets the HLA-A locus, a gRNA that targets the HLA-B locus, and a gRNA that targets the HLA-DR locus, the HLA-DQ locus, or the HLA-DP locus, and the at least one gRNA that is cognate to the second genomic editor or the RNA-guided cleavase comprises a gRNA that targets the AAVS1 locus.
   Embodiment 165 is the composition of any one of embodiments 87-164, further comprising a nucleic acid encoding an exogenous gene for insertion into the TRAC or AAVS1 locus.
   Embodiment 166 is the composition of embodiment 164, wherein in any one of subparts (i)-(ix), the at least one gRNA that is cognate to the second genomic editor or the RNA-guided cleavase comprises a further gRNA that targets the AAVS1 locus.
   Embodiment 167 is the composition of embodiment 164, wherein in any one of subparts (x)-(xiii), the at least one gRNA that is cognate to the second genomic editor or the RNA-guided cleavase comprises a further gRNA that targets the TRAC locus.
   Embodiment 168 is the method or composition of any one of embodiments 1, 16, 17, 87, and 101, wherein the first genome editing tool, the second genome editing tool, and the gRNAs are collectively contained in: (i) a first lipid nanoparticle (LNP) comprising the second genomic editor and a first gRNA, (ii) a second LNP comprising the first genomic editor or the base editor, (iii) a third LNP comprising a uracil glycosylase inhibitor (UGI), (iv) a fourth LNP comprising a second gRNA, (v) a fifth LNP comprising a third gRNA, and (vi) a sixth LNP comprising a fourth gRNA.
   Embodiment 169 is the method or composition of any one of embodiments 1, 16, 17, 87, and 101, wherein the first genome editing tool, the second genome editing tool, and the gRNAs are collectively contained in: (i) a first lipid nanoparticle (LNP) comprising the second genomic editor and a first gRNA, (ii) a second LNP comprising the first genomic editor or the base editor, (iii) a third LNP comprising a uracil glycosylase inhibitor (UGI), (iv) a fourth LNP comprising a second gRNA and a third gRNA, and (v) a fifth LNP comprising a fourth gRNA.
   Embodiment 170 is the method or composition of any one of embodiments 1, 16, 17, 87, and 101, wherein the first genome editing tool, the second genome editing tool, and the gRNAs are collectively contained in: (i) a first lipid nanoparticle (LNP) comprising the second genomic editor and a first gRNA, (ii) a second LNP comprising the first genomic editor or the base editor and comprising a uracil glycosylase inhibitor (UGI), (iii) a third LNP comprising a second gRNA, (iv) a fourth LNP comprising a third gRNA, and (v) a fifth LNP comprising a fourth gRNA.
   Embodiment 171 is the method or composition of any one of embodiments 1, 16, 17, 87, and 101, wherein the first genome editing tool, the second genome editing tool, and the gRNAs are collectively contained in: (i) a first lipid nanoparticle (LNP) comprising the second genomic editor and a first gRNA, (ii) a second LNP comprising the first genomic editor or the base editor and comprising a uracil glycosylase inhibitor (UGI), (iii) a third LNP comprising a second gRNA and a third gRNA, and (iv) a fourth LNP comprising a fourth gRNA.
   Embodiment 172 is the method or composition of any one of embodiments 1, 16, 17, 87, and 101, wherein the first genome editing tool, the second genome editing tool, and the gRNAs are collectively contained in: (i) a first lipid nanoparticle (LNP) comprising the second genomic editor and a first gRNA, (ii) a second LNP comprising the first genomic editor or the base editor, (iii) a third LNP comprising a uracil glycosylase inhibitor (UGI), (iv) a fourth LNP comprising a second gRNA, a third gRNA, and a fourth gRNA.
   Embodiment 173 is the method or composition of any one of embodiments 1, 16, 17, 87, and 101, wherein the first genome editing tool, the second genome editing tool, and the gRNAs are collectively contained in: (i) a first lipid nanoparticle (LNP) comprising the second genomic editor and a first gRNA, (ii) a second LNP comprising a uracil glycosylase inhibitor (UGI), (iii) a third LNP comprising the first genomic editor or the base editor and comprising a second gRNA, (iv) a fourth LNP comprising the first genomic editor or the base editor and comprising a third gRNA, and (v) a fifth LNP comprising the first genomic editor or the base editor and comprising a fourth gRNA.
   Embodiment 174 is the method or composition of any one of embodiments 1, 16, 17, 87, and 101, wherein the first genome editing tool, the second genome editing tool, and the gRNAs are collectively contained in: (i) a first lipid nanoparticle (LNP) comprising the second genomic editor and a first gRNA, (ii) a second LNP comprising a uracil glycosylase inhibitor (UGI), (iii) a third LNP comprising the first genomic editor or the base editor and comprising a second gRNA and a third gRNA, and (iv) a fourth LNP comprising the first genomic editor or the base editor and comprising a fourth gRNA.
   Embodiment 175 is the method or composition of any one of embodiments 168-174, wherein the first genome editing tool, the second genome editing tool, and the gRNAs are collectively contained in the first through fourth LNPs, the first through fifth LNPs, or the first through sixth LNPs, and in one or more additional LNP comprising a fifth gRNA.
   Embodiment 176 is the method or composition of embodiment 175, wherein the one or more additional LNP further comprises a sixth gRNA.
   Embodiment 177 is the method or composition of embodiment 176, wherein the one or more additional LNP further comprises a seventh gRNA.
   Embodiment 178 is the method or composition of embodiment 177, wherein the one or more additional LNP further comprises an eighth gRNA.
   Embodiment 179 is the method or composition of embodiment 178, wherein the one or more additional LNP further comprises a ninth gRNA.
   Embodiment 180 is the method or composition of embodiment 179, wherein the one or more additional LNP further comprises a tenth gRNA.
   Embodiment 181 is the method or composition of any one of embodiments 168-180, wherein the second genomic editor comprises an S. pyogenes (Spy) Cas9 cleavase, the first genomic editor or the base editor comprises an N. meningitidis (Nine) Cas9 nickase, the first gRNA targets the TRAC locus, the second gRNA targets the HLA-A locus, the third gRNA targets the CIITA locus, the fourth gRNA targets the HLA-B locus, the fifth gRNA targets the TRBC locus and the one or more additional gRNAs each targets a locus different from the TRAC locus, the HLA-A locus, the HLA-B locus, the CIITA locus, and the TRBC locus.
   Embodiment 182 is the method or composition of embodiment 181, wherein the first gRNA comprises the sequence of SEQ ID NO: 374 or 378 or a sequence at least 95%, 90%, or 85% identical to SEQ ID NO: 374 or 378, wherein the second gRNA comprises the sequence of SEQ ID NO: 366 or 370 or a sequence at least 95%, 90%, or 85% identical to SEQ ID NO: 366 or 370, wherein the third gRNA comprises the sequence of SEQ ID NO: 345 or 384 or a sequence at least 95%, 90%, or 85% identical to SEQ ID NO: 345 or 384, and wherein the fourth gRNA comprises the sequence of SEQ ID NO: 363 or a sequence at least 95%, 90%, or 85% identical to SEQ ID NO: 363.
   Embodiment 183 is the method or composition of any one of embodiments 1-167, wherein the first genome editing tool, the second genome editing tool, and the gRNAs are collectively contained in at least 2, 3, 4, 5, 6, 7, 8, 9, or 10 distinct lipid nanoparticles (LNP) each comprising a distinct nucleic acid component.
   Embodiment 184 is the method or composition of embodiment 183, wherein the first genome editing tool, the second genome editing tool, and the gRNAs are collectively contained in 4, 5, 6, or 7 distinct lipid nanoparticles (LNP) each comprising a distinct nucleic acid component.
   Embodiment 185 is the method or composition of embodiment 183, wherein the first genome editing tool, the second genome editing tool, and the gRNAs are collectively contained in 4 distinct LNPs each comprising a distinct nucleic acid component.
   Embodiment 186 is the method or composition of embodiment 183, wherein the first genome editing tool, the second genome editing tool, and the gRNAs are collectively contained in 5 distinct LNPs each comprising a distinct nucleic acid component.
   Embodiment 187 is the method or composition of embodiment 183, wherein the first genome editing tool, the second genome editing tool, and the gRNAs are collectively contained in 6 distinct LNPs each comprising a distinct nucleic acid component.
   Embodiment 188 is the method or composition of embodiment 183, wherein the first genome editing tool, the second genome editing tool, and the gRNAs are collectively contained in 7 distinct LNPs each comprising a distinct nucleic acid component.
   Embodiment 189 is the method or composition of any one of embodiments 1-167, wherein the at least one gRNA that is cognate to the first genomic editor or the base editor and the at least one gRNA that is cognate to the second genomic editor collectively comprise at least 2 gRNAs, and wherein 2 of the gRNAs that target different genomic loci are contained in a same lipid nanoparticle (LNP).
   Embodiment 190 is the method or composition of any one of embodiments 1-167 and 189, wherein the at least one gRNA that is cognate to the first genomic editor or the base editor and the at least one gRNA that is cognate to the second genomic editor collectively comprise at least 3 gRNAs, and wherein 3 of the gRNAs that target different genomic loci are contained in a same lipid nanoparticle.
   Embodiment 191 is the method or composition of any one of embodiments 1-167, 189, and 190, wherein the at least one gRNA that is cognate to the first genomic editor or the base editor and the at least one gRNA that is cognate to the second genomic editor collectively comprise at least 4 gRNAs, and wherein 4 of the gRNAs that target different genomic loci are contained in a same lipid nanoparticle.
   Embodiment 192 is the method or composition of any one of embodiments 189-191, wherein each of the other gRNAs is contained in a different LNP.
   Embodiment 193 is the method or composition of any one of embodiments 1-167, wherein each one of the gRNAs is contained in a different LNP.
   Embodiment 194 is the method or composition of any one of embodiments 1-167, wherein the at least one gRNA that is cognate to the first genomic editor or the base editor comprises more than one gRNAs that target different genomic loci, and the first genomic editor or the base editor is contained in a same LNP with at least one of the more than one gRNAs.
   Embodiment 195 is the method or composition of embodiment 194, wherein the first genomic editor or the base editor and one of the gRNAs are contained in a same LNP.
   Embodiment 196 is the method or composition of embodiment 194 or 195, wherein the first genomic editor or the base editor and 2 of the gRNAs are contained in a same LNP.
   Embodiment 197 is the method or composition of any one of embodiments 194-196, wherein the first genomic editor or the base editor and 3 of the gRNAs are contained in a same LNP.
   Embodiment 198 is the method or composition of any one of embodiments 194-197, wherein the first genomic editor or the base editor and 4 of the gRNAs are contained in a same LNP.
   Embodiment 199 is the method or composition of any one of embodiments 1-167, wherein the first genomic editor or the base editor is contained in a different LNP than each of the at least one gRNA that is cognate to the first genomic editor or the base editor.
   Embodiment 200 is the method or composition of any one of embodiments 1-167, wherein the at least one gRNA that is cognate to the first genomic editor or the base editor comprises more than one gRNAs that target different genomic loci, and each of the more than one gRNAs is contained in a different LNP.
   Embodiment 201 is the method or composition of embodiment 200, wherein each of the LNPs comprising one of the gRNAs cognate to the first genomic editor or the base editor further comprises the first genomic editor or the base editor.
   Embodiment 202 is the method or composition of any one of embodiments 1-167, wherein the second genomic editor and the at least one gRNA that is cognate to the second genomic editor are contained in a same LNP.
   Embodiment 203 is the method or composition of embodiment 202, wherein the second genomic editor is contained in a same LNP with one of the gRNAs.
   Embodiment 204 is the method or composition of any one of embodiments 1-167, wherein the first genome editing tool comprises a uracil glycosylase inhibitor (UGI), and the UGI is contained in a different LNP than each one of the gRNAs.
   Embodiment 205 is the method or composition of any one of embodiments 1-204, wherein the LNPs comprise a first group of distinct LNPs, and a second group of distinct LNPs, and optionally, a third group of distinct LNPs.
   Embodiment 206 is the method or composition of embodiment 205, wherein the first group of distinct LNPs comprises 2, 3, 4, or 5 LNPs, the second group of distinct LNPs comprises 2, 3, 4, or 5 LNPs, and the third group of distinct LNPs, when present, comprises 2, 3, 4, or 5 LNPs.
   Embodiment 207 is the method or composition of embodiment 205 or 206, wherein the first group of distinct LNPs comprises 3 or 4 LNPs, the second group of distinct LNPs comprises 3 or 4 LNPs.
   Embodiment 208 is the method or composition of any one of embodiments 205-207, wherein the first group of distinct LNPs, the second group of distinct LNPs, and the third group of distinct LNPs, when present, are delivered to the cell sequentially.
   Embodiment 209 is the method or composition of any one of embodiments 205-208, wherein the second group of distinct LNPs is delivered to the cell 1, 2, or 3 days after the first group of distinct LNPs is delivered to the cell, and wherein the third group of distinct LNPs, when present, is delivered to the cell 1, 2, or 3 days after the second group of distinct LNPs is delivered to the cell.
   Embodiment 210 is the method or composition of any one of embodiments 205-209, wherein the second group of distinct LNPs is delivered to the cell 1 day after the first group of distinct LNPs is delivered to the cell.
   Embodiment 211 is the method or composition of any one of embodiments 21-86 and 104-210, wherein the LNP has a diameter of 1-250 nm, 10-200 nm, 20-150 nm, about 35-150 nm, 50-150 nm, 50-100 nm, 50-120 nm, 60-100 nm, 75-150 nm, 75-120 nm, or 75-100 nm.
   Embodiment 212 is the method or composition of embodiment 211, wherein the LNP has a diameter of <100 nm.
   Embodiment 213 is the method or composition of any one of embodiments 21-86 and 104-211, wherein the LNP comprises an ionizable lipid.
   Embodiment 214 is the method or composition of embodiment 213, wherein the ionizable lipid comprises a biodegradable ionizable lipid.
   Embodiment 215 is the method or composition of embodiment 213 or 214, wherein the ionizable lipid has a PK value in the range of pKa in the range of from about 5.1 to about 7.4, such as from about 5.5 to about 6.6, from about 5.6 to about 6.4, from about 5.8 to about 6.2, or from about 5.8 to about 6.5.
   Embodiment 216 is the method or composition of any one of embodiments 213-215, wherein the ionizable lipid comprises an amine lipid.
   Embodiment 217 is the method or composition of embodiment 216, wherein the amine lipid is Lipid A or its acetal analog or Lipid D.
   Embodiment 218 is the method or composition of any one of embodiments any one of embodiments 21-86 and 104-217, wherein the LNP comprises a helper lipid.
   Embodiment 219 is the method or composition of any one of embodiments any one of embodiments 21-86 and 104-218, wherein the N/P ratio of the LNP is about 6.
   Embodiment 220 is the method or composition of any one of embodiments any one of embodiments 21-86 and 104-219, wherein the LNP comprises an amine lipid, a helper lipid, and a PEG lipid.
   Embodiment 221 is the method or composition of any one of embodiments any one of embodiments 21-86 and 104-220, wherein the LNP comprises an amine lipid, a helper lipid, a neutral lipid, and a PEG lipid.
   Embodiment 222 is the method or composition of any one of embodiments any one of embodiments 21-86 and 104-221, wherein the LNP comprises a lipid component and the lipid component comprises: about 50-60 mol % amine lipid such as Lipid A; about 8-10 mol % neutral lipid; and about 2.5-4 mol % stealth lipid (e.g., a PEG lipid), wherein the remainder of the lipid component is helper lipid, and wherein the N/P ratio of the lipid LNP is about 3-7.
   Embodiment 223 is the method or composition of any one of embodiments any one of embodiments 21-86 and 104-222, wherein the LNP comprises a lipid component and the lipid component comprises: about 25-45 mol % amine lipid, such as Lipid A; about 10-30 mol % neutral lipid; about 25-65 mol % helper lipid; and about 1.5-3.5 mol % stealth lipid (e.g., PEG lipid), and wherein the N/P ratio of the LNP is about 3-7.
   Embodiment 224 is the method or composition of embodiment 223, wherein the amount of the amine lipid is about 29-38 mol % of the lipid component; about 30-43 mol % of the lipid component; or about 25-34 mol % of the lipid component; optionally about 33 mol %, about 35 mol % of the lipid component, or about 38 mol % of the lipid component.
   Embodiment 225 is the method or composition of 223 or 224, wherein the amount of the neutral lipid is about 11-20 mol % of the lipid component, optionally about 15 mol % of the lipid component.
   Embodiment 226 is the method or composition of any one of embodiments 223-225, wherein the amount of the helper lipid is about 43-65 mol % of the lipid component; or about 43-55 mol % of the lipid component; optionally about 47.5 mol % of the lipid component or about 49 mol % of the lipid component.
   Embodiment 227 is the method or composition of any one of embodiments 223-226, wherein the amount of the PEG lipid is about 2.0-3.5 mol % of the lipid component; about 2.3-3.5 mol % of the lipid component; or about 2.3-2.7 mol % of the lipid component, optionally about 2.5 mol % of the lipid component or about 2.7 mol % of the lipid component.
   Embodiment 228 is the method or composition of any one of embodiments 223-237, wherein
[0086] a. the amount of the amine lipid is about 29-44 mol % of the lipid component; the amount of the neutral lipid is about 11-28 mol % of the lipid component; the amount of the helper lipid is about 28-55 mol % of the lipid component; and the amount of the PEG lipid is about 2.3-3.5 mol % of the lipid component
[0087] b. the amount of the amine lipid is about 29-38 mol % of the lipid component; the amount of the neutral lipid is about 11-20 mol % of the lipid component; the amount of the helper lipid is about 43-55 mol % of the lipid component; and the amount of the PEG lipid is about 2.3-2.7 mol % of the lipid component;
[0088] c. the amount of the amine lipid is about 25-34 mol % of the lipid component; the amount of the neutral lipid is about 10-20 mol % of the lipid component; the amount of the helper lipid is about 45-65 mol % of the lipid component; and the amount of the PEG lipid is about 2.5-3.5 mol % of the lipid component; or
[0089] d. the amount of the amine lipid is about 30-43 mol % of the lipid component; the amount of the neutral lipid is about 10-17 mol % of the lipid component; the amount of the helper lipid is about 43.5-56 mol % of the lipid component; and the amount of the PEG lipid is about 1.5-3 mol % of the lipid component.
   Embodiment 229 is the method or composition of any one of embodiments any one of embodiments 21-86 and 104-228, wherein the LNP comprises a lipid component and the lipid component comprises: about 25-50 mol % amine lipid, such as Lipid D; about 7-25 mol % neutral lipid; about 39-65 mol % helper lipid; and about 0.5-1.8 mol % stealth lipid (e.g., PEG lipid), and wherein the N/P ratio of the LNP is about 3-7.
   Embodiment 230 is the method or composition of embodiment 229, wherein the amount of the amine lipid is about 30-45 mol % of the lipid component; or about 30-40 mol % of the lipid component; optionally about 30 mol %, 40 mol %, or 50 mol % of the lipid component.
   Embodiment 231 is the method or composition of embodiment 229 or 230, wherein the amount of the neutral lipid is about 10-20 mol % of the lipid component; or about 10-15 mol % of the lipid component; optionally about 10 mol % or 15 mol % of the lipid component.
   Embodiment 232 is the method or composition of any one of embodiments 229-231, wherein the amount of the helper lipid is about 50-60 mol % of the lipid component; about 39-59 mol % of the lipid component; or about 43.5-59 mol % of the lipid component; optionally about 59 mol % of the lipid component; about 43.5 mol % of the lipid component; or about 39 mol % of the lipid component.
   Embodiment 233 is the method or composition of any one of embodiments 229-232, wherein the amount of the PEG lipid is about 0.9-1.6 mol % of the lipid component; or about 1-1.5 mol % of the lipid component; optionally about 1 mol % of the lipid component or about 1.5 mol % of the lipid component.
   Embodiment 234 is the method or composition of any one of embodiments 229-233, wherein:
[0090] a. the amount of the ionizable lipid is about 27-40 mol % of the lipid component; the amount of the neutral lipid is about 10-20 mol % of the lipid component; the amount of the helper lipid is about 50-60 mol % of the lipid component; and the amount of the PEG lipid is about 0.9-1.6 mol % of the lipid component;
[0091] b. the amount of the ionizable lipid is from about 30-45 mol % of the lipid component; the amount of the neutral lipid is from about 10-15 mol % of the lipid component; the amount of the helper lipid is from about 39-59 mol % of the lipid component; and the amount of the PEG lipid is from about 1-1.5 mol % of the lipid component;
[0092] c. the amount of the ionizable lipid is about 30 mol % of the lipid component; the amount of the neutral lipid is about 10 mol % of the lipid component; the amount of the helper lipid is about 59 mol % of the lipid component; and the amount of the PEG lipid is about 1 mol % of the lipid component;
[0093] d. the amount of the ionizable lipid is about 40 mol % of the lipid component; the amount of the neutral lipid is about 15 mol % of the lipid component; the amount of the helper lipid is about 43.5 mol % of the lipid component; and the amount of the PEG lipid is about 1.5 mol % of the lipid component; or
[0094] e. the amount of the ionizable lipid is about 50 mol % of the lipid component; the amount of the neutral lipid is about 10 mol % of the lipid component; the amount of the helper lipid is about 39 mol % of the lipid component; and the amount of the PEG lipid is about 1 mol % of the lipid component.
   Embodiment 235 is the method or composition of any one of embodiments 216-234, wherein the amine lipid is Lipid A.
   Embodiment 236 is the method or composition of any one of embodiments 216-234, wherein the amine lipid is Lipid D.
   Embodiment 237 is the method or composition of any one of embodiments 221-236, wherein the neutral lipid is DSPC.
   Embodiment 238 is the method or composition of any one of embodiments 222-237, wherein the stealth lipid is PEG-dimyristoylglycerol (PEG-DMG).
   Embodiment 239 is the method or composition of any one of embodiments 218-238, wherein the helper lipid is cholesterol.
   Embodiment 240 is the method or composition of any one of embodiments 21-86 and 104-239, wherein the LNP is pretreated with a serum factor before contacting the cell, optionally wherein the serum factor is a primate serum factor, optionally a human serum factor.
   Embodiment 241 is the method or composition of any one of embodiments 21-86 and 104-240, wherein the LNP is pretreated with a human serum before contacting the cell.
   Embodiment 242 is the method or composition of any one of embodiments 21-86 and 104-241, wherein the LNP is pretreated with an ApoE before contacting the cell, optionally wherein the ApoE is a human ApoE.
   Embodiment 243 is the method or composition of any one of embodiments 21-86 and 104-242, wherein the LNP is pretreated with a recombinant ApoE3 or ApoE4 before contacting the cell, optionally wherein the ApoE3 or ApoE4 is a human ApoE3 or ApoE4.
   Embodiment 244 is a cell, wherein the cell is treated in vitro with the method or composition of any one of embodiments 1-243.
   Embodiment 245 is a cell, wherein the cell is treated in vivo with the method or composition of any one of embodiments 1-243.
   Embodiment 246 is the cell of embodiment 244 or 245, wherein the cell is a human cell.
   Embodiment 247 is the cell of any one of embodiments 244-246, wherein the cell is selected from: a mesenchymal stem cell; a hematopoietic stem cell (HSC); a mononuclear cell; an endothelial progenitor cells (EPC); a neural stem cells (NSC); a limbal stem cell (LSC); a tissue-specific primary cell or a cell derived therefrom (TSC), an induced pluripotent stem cell (iPSC); an ocular stem cell; a pluripotent stem cell (PSC); an embryonic stem cell (ESC); and a cell for organ or tissue transplantation, and optionally a cell for use in ACT therapy.
   Embodiment 248 is the cell of any one of embodiments 244-247, wherein the cell is an immune cell.
   Embodiment 249 is the cell of embodiment 248, wherein the immune cell is selected from a lymphocyte (e.g., T cell, B cell, natural killer cell (“NK cell”, and NKT cell, or iNKT cell)), a monocyte, a macrophage, a mast cell, a dendritic cell, a granulocyte (e.g., neutrophil, eosinophil, and basophil), a primary immune cell, a CD3+ cell, a CD4+ cell, a CD8+ T cell, a regulatory T cell (Treg), a B cell, and a dendritic cell (DC)).
   Embodiment 250 is the cell of embodiment 248, wherein the immune cell is selected from a peripheral blood mononuclear cell (PBMC), a lymphocyte, a T cell, optionally a CD4+ cell, a CD8+ cell, a memory T cell, a naïve T cell, a stem-cell memory T cell; or a B cell, optionally a memory B cell, a naïve B cell; and a primary cell.
   Embodiment 251 is the cell of embodiment 250, wherein the cell is a T cell.
   Embodiment 252 is the cell of embodiment 251, wherein the T cell is selected from a tumor infiltrating lymphocyte (TIL), a T cell expressing an alpha-beta TCR, a T cell expressing a gamma-delta TCR, a regulatory T cell (Treg), a memory T cell, and an early stem cell memory T cell (Tscm, CD27+/CD45+).
   Embodiment 253 is the cell of any one of embodiments 244-252, wherein the cell is isolated from human donor PBMCs or leukopaks before editing.
   Embodiment 254 is the cell of any one of embodiments 244-253, wherein the cell is derived from a progenitor cell before editing.
   Embodiment 255 is a population of cells, comprising the cell of any one of embodiments 244-254.
   Embodiment 256 is the population of cells of embodiment 255, wherein the population comprises edited T cells, and wherein at least 30%, 40%, 50%, 55%, 60%, 65% of the cells of the population have a memory phenotype (CD27+, CD45RA+).
   Embodiment 257 is the population of cells of embodiment 255 or 256, wherein the cells are non-activated immune cells.
   Embodiment 258 is the population of cells of any one of embodiments 255-257, wherein the cells are activated immune cells.
   Embodiment 259 is the population of cells of any one of embodiments 255-258, wherein the cells are T cells and the cells are responsive to repeat stimulation after editing.
   Embodiment 260 is the population of cells of any one of embodiments 255-259, wherein the cells are cultured, expanded, or proliferated ex vivo.
   Embodiment 261 is the cell, the population of cells, or the composition of any one of embodiments 87-260, for use in treating cancer.
   Embodiment 262 Use of the cell, the population of cells, or the composition of any one of embodiments 87-261 for preparation of a medicament for treating cancer.
   Embodiment 263 is an engineered cell comprising at least three base edits in at least three genomic loci, and at least one exogenous gene.
   Embodiment 264 is a composition comprising:
[0095] a. a gRNA comprising a guide sequence chosen from: i) SEQ ID NOs: 251-264; ii) at least 17, 18, 19, or 20 contiguous nucleotides of a sequence selected from SEQ ID NOs: 251-264; iii) a guide sequence at least 95%, 90%, or 85% identical to a sequence selected from SEQ ID NOs: 251-264; iv) a sequence that comprises 10 contiguous nucleotides±10 nucleotides of a genomic coordinate listed in Table 5; v) at least 17, 18, 19, or 20 contiguous nucleotides of a sequence from (iv); or vi) a guide sequence that is at least 95%, 90%, or 85% identical to a sequence selected from (v); or
[0096] b. a nucleic acid encoding a gRNA of (a.).
   Embodiment 265 is a method of altering a DNA sequence within an AAVS1 gene, comprising delivering to a cell:
[0097] a. a gRNA comprising a guide sequence chosen from: i) SEQ ID NOs: 251-264; ii) at least 17, 18, 19, or 20 contiguous nucleotides of a sequence selected from SEQ ID NOs: 251-264; iii) a guide sequence at least 95%, 90%, or 85% identical to a sequence selected from SEQ ID NOs: 251-264; iv) a sequence that comprises 10 contiguous nucleotides±10 nucleotides of a genomic coordinate listed in Table 5; v) at least 17, 18, 19, or 20 contiguous nucleotides of a sequence from (iv); or vi) a guide sequence that is at least 95%, 90%, or 85% identical to a sequence selected from (v); or
[0098] b. a nucleic acid encoding a gRNA of (a.).
   Embodiment 266 is a method of immunotherapy comprising administering a composition comprising an engineered cell to a subject,
[0099] wherein the cell comprises a genomic modification in the AAVS1 gene, wherein the genetic modification comprises an insertion within the genomic coordinates selected from: chr19:55115695-55115715; chr19:55115588-55115608; chr19:55115616-55115636; chr19:55115623-55115643; chr19:55115637-55115657; chr19:55115691-55115711; chr19:55115755-55115775; chr19:55115823-55115843; chr19:55115834-55115854; chr19:55115835-55115855; chr19:55115836-55115856; chr19:55115850-55115870; chr19:55115951-55115971; and chr19:55115949-55115969; or
[0100] wherein the cell is engineered by delivering to the cell:
[0101] a. a gRNA comprising a guide sequence chosen from: i) SEQ ID NOs: 251-264; ii) at least 17, 18, 19, or 20 contiguous nucleotides of a sequence selected from SEQ ID NOs: 251-264; iii) a guide sequence at least 95%, 90%, or 85% identical to a sequence selected from SEQ ID NOs: 251-264; iv) a sequence that comprises 10 contiguous nucleotides±10 nucleotides of a genomic coordinate listed in Table 5; v) at least 17, 18, 19, or 20 contiguous nucleotides of a sequence from (iv); or vi) a guide sequence that is at least 95%, 90%, or 85% identical to a sequence selected from (v); or
[0102] b. a nucleic acid encoding a gRNA of (a.).
   Embodiment 267 is an engineered cell comprising a genetic modification in the AAVS1 gene, wherein the genetic modification comprises an insertion within the genomic coordinates chosen from: chr19:55115695-55115715; chr19:55115588-55115608; chr19:55115616-55115636; chr19:55115623-55115643; chr19:55115637-55115657; chr19:55115691-55115711; chr19:55115755-55115775; chr19:55115823-55115843; chr19:55115834-55115854; chr19:55115835-55115855; chr19:55115836-55115856; chr19:55115850-55115870; chr19:55115951-55115971; and chr19:55115949-55115969.
   Embodiment 268 is a method or composition of any one of embodiments 1, 16, 17, 87, and 101, wherein the first genome editing tool, the second genome editing tool, and the gRNAs are collectively contained in:
[0103] (a)
   [0104] (i) a first lipid nanoparticle (LNP) comprising a uracil glycosylase inhibitor (UGI); (ii) a second LNP comprising the first genomic editor or the base editor and comprising a second gRNA; (iii) a third LNP comprising the first genomic editor or the base editor and comprising a third gRNA; and (iv) a fourth LNP comprising the first genomic editor or the base editor and comprising a fourth gRNA; and
[0105] (b)
   [0106] (i) a fifth LNP comprising a uracil glycosylase inhibitor (UGI); (ii) a sixth LNP comprising the second genomic editor and a first gRNA; (iii) a nucleic acid encoding an exogenous gene for insertion at an editing site of the first gRNA; (iv) optionally an seventh LNP comprising the first genomic editor or the base editor and comprising a fifth gRNA; (v) optionally a eighth LNP comprising the first genomic editor or the base editor and comprising a sixth gRNA; (vi) optionally a ninth LNP comprising the first genomic editor or the base editor and comprising a seventh gRNA.

### I. DEFINITIONS

[0107] Unless stated otherwise, the following terms and phrases as used herein are intended to have the following meanings:

[0108] “Polynucleotide” and “nucleic acid” are used herein to refer to a multimeric compound comprising nucleosides or nucleoside analogs which have nitrogenous heterocyclic bases or base analogs linked together along a backbone, including conventional RNA, DNA, mixed RNA-DNA, and polymers that are analogs thereof. A nucleic acid “backbone” can be made up of a variety of linkages, including one or more of sugar-phosphodiester linkages, peptide-nucleic acid bonds (“peptide nucleic acids” or PNA; PCT No. WO 95/32305), phosphorothioate linkages, methylphosphonate linkages, or combinations thereof. Sugar moieties of a nucleic acid can be ribose, deoxyribose, or similar compounds with substitutions, e.g., 2′ methoxy, 2′ halide, or 2′-O-(2-methoxyethyl) (2′-O-moe) substitutions. Nitrogenous bases can be conventional bases (A, G, C, T, U), analogs thereof (e.g., modified uridines such as 5-methoxyuridine, pseudouridine, or N1-methylpseudouridine, or others); inosine; derivatives of purines or pyrimidines (e.g., N⁴-methyl deoxyguanosine, deaza- or aza-purines, deaza- or aza-pyrimidines, pyrimidine bases with substituent groups at the 5 or 6 position (e.g., 5-methylcytosine), purine bases with a substituent at the 2, 6, or 8 positions, 2-amino-6-methylaminopurine, O⁶-methylguanine, 4-thio-pyrimidines, 4-amino-pyrimidines, 4-dimethylhydrazine-pyrimidines, and O⁴-alkyl-pyrimidines; U.S. Pat. No. 5,378,825 and PCT No. WO 93/13121). For general discussion see The Biochemistry of the Nucleic Acids 5-36, Adams et al., ed., 11^{th} ed., 1992). Nucleic acids can include one or more “abasic” residues where the backbone includes no nitrogenous base for position(s) of the polymer (U.S. Pat. No. 5,585,481). A nucleic acid can comprise only conventional RNA or DNA sugars, bases and linkages, or can include both conventional components and substitutions (e.g., conventional bases with 2′ methoxy linkages, or polymers containing both conventional bases and one or more base analogs). Nucleic acid includes “locked nucleic acid” (LNA), an analogue containing one or more LNA nucleotide monomers with a bicyclic furanose unit locked in an RNA mimicking sugar conformation, which enhance hybridization affinity toward complementary RNA and DNA sequences (Vester and Wengel, 2004, Biochemistry 43(42):13233-41). Nucleic acid includes “unlocked nucleic acid” enables the modulation of the thermodynamic stability and also provides nuclease stability. RNA and DNA have different sugar moieties and can differ by the presence of uracil or analogs thereof in RNA and thymine or analogs thereof in DNA.

[0109] “Polypeptide” as used herein refers to a multimeric compound comprising amino acid residues that can adopt a three-dimensional conformation. Polypeptides include but are not limited to enzymes, enzyme precursor proteins, regulatory proteins, structural proteins, receptors, nucleic acid binding proteins, antibodies, etc. Polypeptides may, but do not necessarily, comprise post-translational modifications, non-natural amino acids, prosthetic groups, and the like.

[0110] As used herein, “ribonucleoprotein” (RNP) or “RNP complex” refers to a guide RNA together with an RNA-guided DNA binding agent, such as a Cas nuclease, e.g., a Cas cleavase, Cas nickase, or dCas DNA binding agent (e.g., Cas9). In some embodiments, the guide RNA guides the RNA-guided DNA binding agent such as Cas9 to a target sequence, and the guide RNA hybridizes with the target sequence and the agent binds to the target sequence; in cases where the agent is a cleavase or nickase, binding can be followed by cleaving or nicking.

[0111] As used herein, an “RNA-guided DNA binding agent” means a polypeptide or complex of polypeptides having RNA and DNA binding activity, or a DNA-binding subunit of such a complex, wherein the DNA binding activity is sequence-specific and depends on the presence of a PAM and the sequence of the guide RNA. Exemplary RNA-guided DNA binding agents include Cas cleavases/nickases and inactivated forms thereof (“dCas DNA binding agents”). “Cas nuclease”, also called “Cas protein” as used herein, encompasses Cas cleavases, Cas nickases, and dCas DNA binding agents. Cas cleavases/nickases and dCas DNA binding agents include a Csm or Cmr complex of a type III CRISPR system, the Cas10, Csm1, or Cmr2 subunit thereof, a Cascade complex of a type I CRISPR system, the Cas3 subunit thereof, and Class 2 Cas nucleases. As used herein, a “Class 2 Cas nuclease” is a single-chain polypeptide with RNA-guided DNA binding activity. Class 2 Cas nucleases include Class 2 Cas cleavases/nickases (e.g., H840A, D10A, or N863A variants), which further have RNA-guided DNA cleavases or nickase activity, and Class 2 dCas DNA binding agents, in which cleavase/nickase activity is inactivated. Class 2 Cas nucleases include, for example, Cas9, Cpf1, C2c1, C2c2, C2c3, HF Cas9 (e.g., N497A, R661A, Q695A, Q926A variants), HypaCas9 (e.g., N692A, M694A, Q695A, H698A variants), eSPCas9 (1.0) (e.g., K810A, K1003A, R1060A variants), and eSPCas9 (1.1) (e.g., K848A, K1003A, R1060A variants) proteins and modifications thereof. Cpf1 protein, Zetsche et al., Cell, 163: 1-13 (2015), is homologous to Cas9, and contains a RuvC-like nuclease domain. Cpf1 sequences of Zetsche are incorporated by reference in their entirety. See, e.g., Zetsche, Tables S1 and S3. See, e.g., Makarova et al., Nat Rev Microbiol, 13(11): 722-36 (2015); Shmakov et al., Molecular Cell, 60:385-397 (2015).

[0112] As used herein, the term “genomic editor” or “editor” refers to an agent comprising a polypeptide that is capable of making a modification within a nucleic acid sequence (e.g., DNA or RNA). In some embodiments, the editor is a cleavase, such as a Cas9 cleavase. In some embodiments, the editor is capable of deaminating a base within a nucleic acid, and it may be called a base editor. In some embodiments, the editor is capable of deaminating a base within a DNA molecule. In some embodiments, the editor is capable of deaminating a cytosine (C) in DNA. In some embodiments, the editor is a fusion protein comprising an RNA-guided nickase fused to a cytidine deaminase domain. In some embodiments, the editor is a combination of an RNA-guided nickase and a cytidine deaminase domain. In some embodiments, the editor is a fusion protein comprising an RNA-guided nickase fused to an APOBEC3A deaminase (A3A). In some embodiments, the editor comprises a Cas9 nickase fused to an APOBEC3A deaminase (A3A). In some embodiments, the editor is a fusion protein comprising an enzymatically inactive RNA-guided DNA-binding protein fused to a cytidine deaminase domain. In some embodiments, the editor is a nickase fused to a DNA polymerase.

[0113] As used herein, the term “genome editing tool” refers to an agent comprising a genomic editor and at least one guide RNA cognate to a nuclease or nickase component of the genomic editor.

[0114] A genomic editor, for example, may comprise a C to T base editor, and may or may not comprise a uracil glycosylase inhibitor (UGI). A genomic editor, for example, may comprise a cytidine deaminase, an RNA-guided nickase, and a UGI, wherein the cytidine deaminase, the RNA-guided nickase, and the UGI are comprised in a single polypeptide, wherein the cytidine deaminase, the RNA-guided nickase, and the UGI are comprised in different polypeptides, or wherein the deaminase and the RNA-guided nickase are comprised in a single polypeptide, and the UGI is comprised in a different polypeptide. In some embodiments, the deaminase comprises a cytidine deaminase.

[0115] As used herein, the term “orthogonal” refers to any two genomic editors (e.g., base editors, nucleases, nickases, or cleavases) where each is capable of recognizing its own target(s) via its cognate guide RNA(s) but not compatible with the guide RNA(s) cognate to the other genomic editor, e.g., each is not capable of recognizing the target(s) of the other genomic editor via the guide RNA(s) cognate to the other genomic editor. For example, an N. meningitidis Cas9 (NmeCas9) nickase may be capable of recognizing a genomic locus via a guide RNA cognate to the NmeCas9 nickase, and an S. pyogenes Cas9 (SpyCas9) cleavase may be capable of recognizing another genomic locus via a guide RNA cognate to the SpyCas9 cleavase. In this example, the NmeCas9 nickase and the SpyCas9 cleavase are orthogonal to each other. Genome editors or genome editing components may be engineered to be orthogonal. Although in this example, the NmeCas9 nickase and the SpyCas9 cleavase are derived from different organisms, two genomic editors need not be derived from different organisms to be orthogonal to each other.

[0116] As used herein, a “cytidine deaminase” means a polypeptide or complex of polypeptides that is capable of cytidine deaminase activity, that is catalyzing the hydrolytic deamination of cytidine or deoxycytidine, typically resulting in uridine or deoxyuridine. Cytidine deaminases encompass enzymes in the cytidine deaminase superfamily, and in particular, enzymes of the APOBEC family (APOBEC1, APOBEC2, APOBEC4, and APOBEC3 subgroups of enzymes), activation-induced cytidine deaminase (AID or AICDA) and CMP deaminases (see, e.g., Conticello et al., Mol. Biol. Evol. 22:367-77, 2005; Conticello, Genome Biol. 9:229, 2008; Muramatsu et al., J. Biol. Chem. 274: 18470-6, 1999); Carrington et al., Cells 9:1690 (2020)). In some embodiments, variants of any known cytidine deaminase or APOBEC protein are encompassed. Variants include proteins having a sequence that differs from wild-type protein by one or several mutations (i.e., substitutions, deletions, insertions), such as one or several single point substitutions. For instance, a shortened sequence could be used, e.g., by deleting N-terminal, C-terminal, or internal amino acids, preferably one to four amino acids at the C-terminus of the sequence. As used herein, the term “variant” refers to allelic variants, splicing variants, and natural or artificial mutants, which are homologous to a reference sequence. The variant is “functional” in that it shows a catalytic activity of DNA editing.

[0117] As used herein, the term “APOBEC3A” refers to a cytidine deaminase such as the protein expressed by the human A3A gene. The APOBEC3A may have catalytic DNA editing activity. An amino acid sequence of APOBEC3A has been described (UniPROT accession ID: p31941) and is included herein as SEQ ID NO: 22. In some embodiments, the APOBEC3A protein is a human APOBEC3A protein or a wild-type protein. Variants include proteins having a sequence that differs from wild-type APOBEC3A protein by one or several mutations (i.e., substitutions, deletions, insertions), such as one or several single point substitutions. For instance, a shortened APOBEC3A sequence could be used, e.g. by deleting N-terminal, C-terminal, or internal amino acids, preferably one to four amino acids at the C-terminus of the sequence. As used herein, the term “variant” refers to allelic variants, splicing variants, and natural or artificial mutants, which are homologous to an APOBEC3A reference sequence. The variant is “functional” in that it shows a catalytic activity of DNA editing. In some embodiments, an APOBEC3A (such as a human APOBEC3A) has a wild-type amino acid position 57 (as numbered in the wild-type sequence). In some embodiments, an APOBEC3A (such as a human APOBEC3A) has an asparagine at amino acid position 57 (as numbered in the wild-type sequence).

[0118] As used herein, a “nickase” is an enzyme that creates a single-strand break (also known as a “nick”) in double strand DNA, i.e., cuts one strand but not the other of the DNA double helix. As used herein, an “RNA-guided nickase” means a polypeptide or complex of polypeptides having DNA nickase activity, wherein the DNA nickase activity is sequence-specific and depends on the sequence of the RNA. Exemplary RNA-guided nickases include Cas nickases. Cas nickases include, but are not limited to, nickase forms of a Csm or Cmr complex of a type III CRISPR system, the Cas10, Csm1, or Cmr2 subunit thereof, a Cascade complex of a type I CRISPR system, the Cas3 subunit thereof, and Class 2 Cas nucleases. Class 2 Cas nickases include, polypeptides in which either the HNH or RuvC catalytic domain is inactivated, for example, Cas9 (e.g., H840A, D10A, or N863A variants of SpyCas9 or D16A variant of NmeCas9). Exemplary amino acid substitutions in the HNH or HNH-like nuclease domain or RuvC or RuvC-like domains for N. meningitidis include Nme2Cas9D16A (HNH nickase) and Nme2Cas9H588A (RuvC nickase). Class 2 Cas nickases include, for example, Cas9 (e.g., H840A, D10A, or N863A variants of SpyCas9), Cpf1, C2c1, C2c2, C2c3, HF Cas9 (e.g., N497A, R661A, Q695A, Q926A variants), HypaCas9 (e.g., N692A, M694A, Q695A, H698A variants), eSPCas9 (1.0) (e.g., K810A, K1003A, R1060A variants), and eSPCas9 (1.1) (e.g., K848A, K1003A, R1060A variants) proteins and modifications thereof. Cpf1 protein, Zetsche et al., Cell, 163: 1-13 (2015), is homologous to Cas9, and contains a RuvC-like protein domain. Cpf1 sequences of Zetsche are incorporated by reference in their entirety. See, e.g., Zetsche, Tables S1 and S3. “Cas9” encompasses S. pyogenes (Spy) Cas9, the variants of Cas9 listed herein, and equivalents thereof. See, e.g., Makarova et al., Nat Rev Microbiol, 13(11): 722-36 (2015); Shmakov et al., Molecular Cell, 60:385-397 (2015).

[0119] As used herein, the term “fusion protein” refers to a hybrid polypeptide which comprises polypeptides from at least two different proteins or sources. One polypeptide may be located at the amino-terminal (N-terminal) portion of the fusion protein or at the carboxy-terminal (C-terminal) protein thus forming an “amino-terminal fusion protein” or a “carboxy-terminal fusion protein,” respectively. Any of the proteins provided herein may be produced by any method known in the art. For example, the proteins provided herein may be produced via recombinant protein expression and purification, which is especially suited for fusion proteins comprising a peptide linker. Methods for recombinant protein expression and purification are well known, and include those described by Green and Sambrook, Molecular Cloning: A Laboratory Manual (4th ed., Cold Spring Harbor Laboratory Press, Cold Spring Harbor, N.Y. (2012)), the entire contents of which are incorporated herein by reference.

[0120] The term “linker,” as used herein, refers to a chemical group or a molecule linking two adjacent molecules or moieties. Typically, the linker is positioned between, or flanked by, two groups, molecules, or other moieties and connected to each one via a covalent bond. In some embodiments, the linker is an amino acid or a plurality of amino acids (e.g., a peptide or protein) such as a 16-amino acid residue “XTEN” linker, or a variant thereof (See, e.g., the Examples; and Schellenberger et al. A recombinant polypeptide extends the in vivo half-life of peptides and proteins in a tunable manner. Nat. Biotechnol. 27, 1186-1190 (2009)). In some embodiments, the XTEN linker comprises the sequence SGSETPGTSESATPES (SEQ ID NO: 25), SGSETPGTSESA (SEQ ID NO: 26), or SGSETPGTSESATPEGGSGGS (SEQ ID NO: 27). In some embodiments, the linker comprises one or more sequences selected from SEQ ID NOs: 25-39 and 72-133.

[0121] As used herein, the term “uracil glycosylase inhibitor”, “uracil-DNA glycosylase inhibitor” or “UGI” refers to a protein that is capable of inhibiting a uracil-DNA glycosylase (UDG) base-excision repair enzyme (e.g., UniPROT ID: P14739; SEQ ID NO: 15; SEQ ID NO: 24).

[0122] As used herein, the terms “nuclear localization signal” (NLS) or “nuclear localization sequence” refers to an amino acid sequence which induces transport of molecules comprising such sequences or linked to such sequences into the nucleus of eukaryotic cells. The nuclear localization signal may form part of the molecule to be transported. In some embodiments, the NLS may be fused to the molecule by a covalent bond, hydrogen bonds or ionic interactions. In some embodiments, the NLS may be fused to the molecule via a linker.

[0123] As used herein, “open reading frame” or “ORF” of a gene refers to a sequence consisting of a series of codons that specify the amino acid sequence of the protein that the gene codes for. The ORF generally begins with a start codon (e.g., ATG in DNA or AUG in RNA) and ends with a stop codon, e.g., TAA, TAG or TGA in DNA or UAA, UAG, or UGA in RNA.

[0124] “Guide RNA”, “gRNA”, and “guide” are used herein interchangeably to refer to either a crRNA (also known as CRISPR RNA), or the combination of a crRNA and a trRNA (also known as tracrRNA). The crRNA and trRNA may be associated as a single RNA molecule (single guide RNA, sgRNA) or in two separate RNA molecules (dual guide RNA, dgRNA). “Guide RNA” or “gRNA” refers to each type. The trRNA may be a naturally-occurring sequence, or a trRNA sequence with modifications or variations compared to naturally-occurring sequences.

[0125] As used herein, a “guide sequence” or “guide region” or “targeting sequence” or “spacer” or “spacer sequence” and the like refers to a sequence within a gRNA that is complementary to a target sequence and functions to direct a gRNA to a target sequence for binding or modification (e.g., cleavage) by an RNA-guided nickase. A guide sequence can be 20 nucleotides in length, e.g., in the case of Streptococcus pyogenes (i.e., Spy Cas9 (also referred to as SpCas9)) and related Cas9 homologs/orthologs. Shorter or longer sequences can also be used as guides, e.g., 15-, 16-, 17-, 18-, 19-, 21-, 22-, 23-, 24-, or 25-nucleotides in length. A guide sequence can be 20-25 nucleotides in length, e.g., in the case of Nine Cas9, e.g., 20-, 21-, 22-, 23-, 24- or 25-nucleotides in length. For example, a guide sequence of 24 nucleotides in length can be used with Nine Cas9, e.g., Nme2 Cas9.

[0126] In some embodiments, the target sequence is in a genomic locus or on a chromosome, for example, and is complementary to the guide sequence. In some embodiments, the degree of complementarity or identity between a guide sequence and its corresponding target sequence may be about 75%, 80%, 85%, 90%, 95%, or 100%. In some embodiments, the guide sequence and the target region may be 100% complementary or identical. In other embodiments, the guide sequence and the target region may contain at least one mismatch. For example, the guide sequence and the target sequence may contain 1, 2, 3, or 4 mismatches, where the total length of the target sequence is at least 17, 18, 19, 20 or more base pairs. In some embodiments, the guide sequence and the target region may contain 1-4 mismatches where the guide sequence comprises at least 17, 18, 19, 20 or more nucleotides. In some embodiments, the guide sequence and the target region may contain 1, 2, 3, or 4 mismatches where the guide sequence comprises 20 nucleotides. In some embodiments, the degree of complementarity or identity between a guide sequence and its corresponding target sequence is at least 80%, 85%, 90%, or 95%, for example when, the guide sequence comprises a sequence 24 contiguous nucleotides. In some embodiments, the guide sequence and the target region may be 100% complementary or identical. In other embodiments, the guide sequence and the target region may contain at least one mismatch, i.e., one nucleotide that is not identical or not complementary, depending on the reference sequence. For example, the guide sequence and the target sequence may contain 1-2, preferably no more than 1 mismatch, where the total length of the target sequence is 19, 20, 21, 22, 23, or 24, nucleotides, or more. In some embodiments, the guide sequence and the target region may contain 1-2 mismatches where the guide sequence comprises at least 24 nucleotides, or more. In some embodiments, the guide sequence and the target region may contain 1-2 mismatches where the guide sequence comprises 24 nucleotides.

[0127] As used herein, a “target sequence” or “genomic target sequence” refers to a sequence of nucleic acid in a target genomic locus, in either the positive or the negative strand, that has complementarity to the guide sequence of the gRNA, i.e., that is sufficiently complementary to the guide sequence of the gRNA to permit specific binding of the guide to the target sequence. The interaction of the target sequence and the guide sequence directs an RNA-guided DNA binding agent to bind, and potentially nick or cleave (depending on the activity of the agent), within the target sequence. The specific length of the target sequence and the number of mismatches possible between the target sequence and the guide sequence depend, for example, on the identity of the Cas9 nuclease being directed by the gRNA. Target sequences for Cas proteins include both the positive and negative strands of genomic DNA (i.e., the sequence given and the sequence's reverse complement), as a nucleic acid substrate for a Cas protein is a double stranded nucleic acid. Accordingly, where a guide sequence is said to be “complementary to a target sequence,” it is to be understood that the guide sequence may direct an RNA-guided DNA binding agent (e.g., dCas9 or impaired Cas9) to bind to the reverse complement of a target sequence. Thus, in some embodiments, where the guide sequence binds the reverse complement of a target sequence, the guide sequence is identical to certain nucleotides of the target sequence (e.g., the target sequence not including the PAM) except for the substitution of U for T in the guide sequence.

[0128] As used herein, a first sequence is considered to “comprise a sequence with at least X % identity to” a second sequence if an alignment of the first sequence to the second sequence shows that X % or more of the positions of the second sequence in its entirety are matched by the first sequence. For example, the sequence AAGA comprises a sequence with 100% identity to the sequence AAG because an alignment would give 100% identity in that there are matches to all three positions of the second sequence. The differences between RNA and DNA (generally the exchange of uridine for thymidine or vice versa) and the presence of nucleoside analogs such as modified uridines do not contribute to differences in identity or complementarity among polynucleotides as long as the relevant nucleotides (such as thymidine, uridine, or modified uridine) have the same complement (e.g., adenosine for all of thymidine, uridine, or modified uridine; another example is cytosine and 5-methylcytosine, both of which have guanosine as a complement). Thus, for example, the sequence 5′-AXG where X is any modified uridine, such as pseudouridine, N1-methyl pseudouridine, or 5-methoxyuridine, is considered 100% identical to AUG in that both are perfectly complementary to the same sequence (5′-CAU). Exemplary alignment algorithms are the Smith-Waterman and Needleman-Wunsch algorithms, which are well-known in the art. One skilled in the art will understand what choice of algorithm and parameter settings are appropriate for a given pair of sequences to be aligned; for sequences of generally similar length and expected identity >50% for amino acids or >75% for nucleotides, the Needleman-Wunsch algorithm with default settings of the Needleman-Wunsch algorithm interface provided by the EBI at the www.ebi.ac.uk web server are generally appropriate.

[0129] “mRNA” is used herein to refer to a polynucleotide that is not DNA and comprises an open reading frame that can be translated into a polypeptide (i.e., can serve as a substrate for translation by a ribosome and amino-acylated tRNAs). mRNA can comprise one or more modifications, e.g. as provided below. In general, mRNAs do not contain a substantial quantity of thymidine residues (e.g., 0 residues or fewer than 30, 20, 10, 5, 4, 3, or 2 thymidine residues; or less than 10%, 9%, 8%, 7%, 6%, 5%, 4%, 4%, 3%, 2%, 1%, 0.5%, 0.2%, or 0.1% thymidine content). An mRNA can contain modified uridines at some or all of its uridine positions.

[0130] “Modified uridine” is used herein to refer to a nucleoside other than thymidine with the same hydrogen bond acceptors as uridine and one or more structural differences from uridine. In some embodiments, a modified uridine is a substituted uridine, i.e., a uridine in which one or more non-proton substituents (e.g., alkoxy, such as methoxy) takes the place of a proton. In some embodiments, a modified uridine is pseudouridine. In some embodiments, a modified uridine is a substituted pseudouridine, i.e., a pseudouridine in which one or more non-proton substituents (e.g., alkyl, such as methyl) takes the place of a proton. In some embodiments, a modified uridine is any of a substituted uridine, pseudouridine, or a substituted pseudouridine.

[0131] “Uridine position” as used herein refers to a position in a polynucleotide occupied by a uridine or a modified uridine. Thus, for example, a polynucleotide in which “100% of the uridine positions are modified uridines” contains a modified uridine at every position that would be a uridine in a conventional RNA (where all bases are standard A, U, C, or G bases) of the same sequence. Unless otherwise indicated, a U in a polynucleotide sequence of a sequence table or sequence listing in or accompanying this disclosure can be a uridine or a modified uridine.

[0132] As used herein, the “minimal uridine codon(s)” for a given amino acid is the codon(s) with the fewest uridines (usually 0 or 1 except for a codon for phenylalanine, where the minimal uridine codon has 2 uridines). Modified uridine residues are considered equivalent to uridines for the purpose of evaluating uridine content.

[0133] As used herein, the “uridine dinucleotide (UU) content” of an ORF can be expressed in absolute terms as the enumeration of UU dinucleotides in an ORF or on a rate basis as the percentage of positions occupied by the uridines of uridine dinucleotides (for example, AUUAU would have a uridine dinucleotide content of 40% because 2 of 5 positions are occupied by the uridines of a uridine dinucleotide). Modified uridine residues are considered equivalent to uridines for the purpose of evaluating uridine dinucleotide content.

[0134] As used herein, the “minimal adenine codon(s)” for a given amino acid is the codon(s) with the fewest adenines (usually 0 or 1 except for a codon for lysine and asparagine, where the minimal adenine codon has 2 adenines). Modified adenine residues are considered equivalent to adenines for the purpose of evaluating adenine content.

[0135] As used herein, the “adenine dinucleotide content” of an ORF can be expressed in absolute terms as the enumeration of AA dinucleotides in an ORF or on a rate basis as the percentage of positions occupied by the adenines of adenine dinucleotides (for example, UAAUA would have an adenine dinucleotide content of 40% because 2 of 5 positions are occupied by the adenines of an adenine dinucleotide). Modified adenine residues are considered equivalent to adenines for the purpose of evaluating adenine dinucleotide content.

[0136] As used herein, the term “genomic locus,” when used in the context of a genomic locus being targeted by a guide RNA, includes one or more parts of a genome, the targeting of which affects the expression of the gene that is associated with the locus. For example, a genomic locus may include a coding sequence of a gene, an intron sequence of a gene, a regulatory sequence, a transcriptional control sequence of a gene, a translational control sequence of a gene, a splicing site, or a non-coding sequence between genes (e.g., intergenic space).

[0137] As used herein, the term “contact” refers to providing at least one component so that the component physically contacts a cell, including physically contacting the cell surface, cytosol, and/or nucleus of the cell. “Contacting” a cell with a polypeptide encompasses, for example, contacting the cell with a nucleic acid that encodes the polypeptide and allowing the cell to express the polypeptide.

[0138] As used herein, the term “simultaneous,” when used in the context of contacting a cell with at least two genome editing tools (e.g., compositions, polypeptides, nucleic acids, or combinations thereof), refers to the contacting of the cell with one of the at least two genome editing tools being no more than 48 hours from the contacting of the cell with the other of the at least two genome editing tools. In some embodiments, the contacting of the cell with one of the at least two genome editing tools is no more than 36 hours from the contacting of the cell with the other of the at least two genome editing tools. In some embodiments, the contacting of the cell with one of the at least two genome editing tools is no more than 24 hours from the contacting of the cell with the other of the at least two genome editing tools. In some embodiments, the contacting of the cell with one of the at least two genome editing tools is no more than 18 hours from the contacting of the cell with the other of the at least two genome editing tools. In some embodiments, the contacting of the cell with one of the at least two genome editing tools is no more than 12 hours from the contacting of the cell with the other of the at least two genome editing tools. In some embodiments, the contacting of the cell with one of the at least two genome editing tools is no more than 6 hours from the contacting of the cell with the other of the at least two genome editing tools. In some embodiments, the contacting of the cell with one of the at least two genome editing tools is no more than 4 hours from the contacting of the cell with the other of the at least two genome editing tools. In some embodiments, the contacting of the cell with one of the at least two genome editing tools is no more than 3 hours from the contacting of the cell with the other of the at least two genome editing tools. In some embodiments, the contacting of the cell with one of the at least two genome editing tools is no more than 2 hours from the contacting of the cell with the other of the at least two genome editing tools. In some embodiments, the contacting of the cell with one of the at least two genome editing tools is no more than 1 hour from the contacting of the cell with the other of the at least two genome editing tools. In some embodiments, the contacting of the cell with one of the at least two genome editing tools is no more than 30 minutes from the contacting of the cell with the other of the at least two genome editing tools. In some embodiments, the contacting of the cell with one of the at least two genome editing tools is no more than 15 minutes from the contacting of the cell with the other of the at least two genome editing tools. In some embodiments, the contacting of the cell with one of the at least two genome editing tools is no more than 10 minutes from the contacting of the cell with the other of the at least two genome editing tools. In some embodiments, the contacting of the cell with one of the at least two genome editing tools is no more than 5 minutes from the contacting of the cell with the other of the at least two genome editing tools. In some embodiments, the contacting of the cell with one of the at least two genome editing tools is at the same time as the contacting of the cell with the other of the at least two genome editing tools. In some embodiments, the two genome editing tools are premixed prior to contacting the cell.

[0139] As used herein, “indel” refers to an insertion or deletion mutation consisting of a number of nucleotides that are either inserted, deleted, or inserted and deleted, e.g., at the site of double-stranded breaks (DSBs), in a target nucleic acid. As used herein, when indel formation results in an insertion, the insertion is a random insertion at the site of a DSB and is not generally directed by or based on a template sequence.

[0140] As used herein, “knockdown” refers to a decrease in expression of a particular gene product (e.g., protein, mRNA, or both). Knockdown of a protein can be measured either by detecting protein secreted by tissue or population of cells (e.g., in serum or cell media) or by detecting total cellular amount of the protein from a tissue or cell population of interest. Methods for measuring knockdown of mRNA are known and include sequencing of mRNA isolated from a tissue or cell population of interest. In some embodiments, “knockdown” may refer to some loss of expression of a particular gene product, for example a decrease in the amount of mRNA transcribed or a decrease in the amount of protein expressed or secreted by a population of cells (including in vivo populations such as those found in tissues).

[0141] As used herein, “knockout” refers to a loss of expression of a particular protein in a cell. Knockout can be measured either by detecting the amount of protein secretion from a tissue or population of cells (e.g., in serum or cell media) or by detecting total cellular amount of a protein a tissue or a population of cells. In some embodiments, the methods of the disclosure “knockout” a target protein one or more cells (e.g., in a population of cells including in vivo populations such as those found in tissues). In some embodiments, a knockout is not the formation of mutant of the target protein, for example, created by indels, but rather the complete loss of expression of the target protein in a cell, i.e., decrease of expression to below the level of detection of the assay used.

[0142] As used herein, a “cell population comprising edited cells,” or a “population of cells comprising edited cells,” or the like refers to a cell population that comprises edited cells, however not all cells in the population must be edited. A cell population comprising edited cells may also include non-edited cells. The percentage of edited cells within a cell population comprising edited cells may be determined by counting the number of cells within the population that are edited in the population as determined by standard cell counting methods. For example, in some embodiments, a cell population comprising edited cells comprising a single genome edit will have at least 20%, 30%, 40%, preferably at least 50%, 60%, 70%, 80%, 90%, 95%, or 99% of the cells in the population with the single edit. In some embodiments, a cell population comprising edited cells comprising at least two genome edits will have at least 20%, 30%, 40%, 50%, 60%, 70%, 80%, 90%, or 95% of the cells in the population with at least two genome edits.

[0143] “β2M” or “B2M,” as used herein, refers to nucleic acid sequence or protein sequence of “β-2 microglobulin;” the human gene has accession number NC_000015 (range 44711492 . . . 44718877), reference GRCh38.p13. The B2M protein is associated with MHC class I molecules as a heterodimer on the surface of nucleated cells and is required for MHC class I protein expression.

[0144] “CIITA” or “CIITA” or “C2TA,” as used herein, refers to the nucleic acid sequence or protein sequence of “class II major histocompatibility complex transactivator;” the human gene has accession number NC_000016.10 (range 10866208 . . . 10941562), reference GRCh38.p13. The CIITA protein in the nucleus acts as a positive regulator of MHC class II gene transcription and is required for MHC class II protein expression.

[0145] As used herein, “MHC” or “MHC molecule(s)” or “MHC protein” or “MHC complex(es),” refers to a major histocompatibility complex molecule (or plural), and includes, e.g., MHC class I and MHC class II molecules. In humans, MHC molecules are referred to as “human leukocyte antigen” complexes or “HLA molecules” or “HLA protein.” The use of terms “MHC” and “HLA” are not meant to be limiting; as used herein, the term “MHC” may be used to refer to human MHC molecules, i.e., HLA molecules. Therefore, the terms “MHC” and “HLA” are used interchangeably herein.

[0146] The term “HLA-A,” as used herein in the context of HLA-A protein, refers to the MHC class I protein molecule, which is a heterodimer consisting of a heavy chain (encoded by the HLA-A gene) and a light chain (i.e., beta-2 microglobulin). The term “HLA-A” or “HLA-A gene,” as used herein in the context of nucleic acids refers to the gene encoding the heavy chain of the HLA-A protein molecule. The HLA-A gene is also referred to as “HLA class I histocompatibility, A alpha chain;” the human gene has accession number NC_000006.12 (29942532 . . . 29945870). The HLA-A gene is known to have thousands of different versions (also referred to as “alleles”) across the population (and an individual may receive two different alleles of the HLA-A gene). A public database for HLA-A alleles, including sequence information, may be accessed at IPD-IMGT/HLA: https://www.ebi.ac.uk/ipd/imgt/hla/. All alleles of HLA-A are encompassed by the terms “HLA-A” and “HLA-A gene.”

[0147] “HLA-B” as used herein in the context of nucleic acids refers to the gene encoding the heavy chain of the HLA-B protein molecule. The HLA-B is also referred to as “HLA class I histocompatibility, B alpha chain;” the human gene has accession number NC_000006.12 (31353875 . . . 31357179).

[0148] “HLA-C” as used herein in the context of nucleic acids refers to the gene encoding the heavy chain of the HLA-C protein molecule. The HLA-C is also referred to as “HLA class I histocompatibility, C alpha chain;” the human gene has accession number NC_000006.12 (31268749 . . . 31272092).

[0149] “TRBC1” and “TRBC2” as used herein in the context of nucleic acids refer to two homologous genes encoding the T-cell receptor β-chain. “TRBC” or “TRBC1/2” is used herein to refer to TRBC1 and TRBC2. The human wild-type TRBC1 sequence is available at NCBI Gene ID: 28639; Ensembl: ENSG00000211751. T-cell receptor Beta Constant, V_segment Translation Product, BV05S1J2.2, TCRBC1, and TCRB are gene synonyms for TRBC1. The human wild-type TRBC2 sequence is available at NCBI Gene ID: 28638; Ensembl: ENSG00000211772. T-cell receptor Beta Constant, V_segment Translation Product, and TCRBC2 are gene synonyms for TRBC2.

[0150] “TRAC” is used to refer to the nucleic acid sequence or amino acid sequence of the “T cell receptor α chain”. A human wild-type TRAC sequence is available at NCBI Gene ID: 28755; Ensembl: ENSG00000277734. T-cell receptor Alpha Constant, TCRA, IMD7, TRCA and TRA are gene synonyms for TRAC.

[0151] “TRBC” is used to refer to the nucleic acid sequence or amino acid sequence of the “T-cell receptor β-chain”, e.g., TRBC1 and TRBC2. “TRBC1” and “TRBC2” refer to two homologous genes encoding the T-cell receptor β-chain, which are the gene products of the TRBC1 or TRBC2 genes.

[0152] A human wild-type TRBC1 sequence is available at NCBI Gene ID: 28639; Ensembl: ENSG00000211751. T-cell receptor Beta Constant, V_segment Translation Product, BV05S1J2.2, TCRBC1, and TCRB are gene synonyms for TRBC1.

[0153] A human wild-type TRBC2 sequence is available at NCBI Gene ID: 28638; Ensembl: ENSG00000211772. T-cell receptor Beta Constant, V_segment Translation Product, and TCRBC2 are gene synonyms for TRBC2.

[0154] As used herein, the term “homozygous” refers to having two identical alleles of a particular gene.

[0155] As used herein, “treatment” refers to any administration or application of a therapeutic for disease or disorder in a subject, and includes inhibiting the disease, arresting its development, relieving one or more symptoms of the disease, curing the disease, or preventing one or more symptoms of the disease, including reoccurrence of the symptom.

[0156] As used herein, “delivering” and “administering” are used interchangeably, and include ex vivo and in vivo applications.

[0157] Co-administration, as used herein, means that a plurality of substances are administered sufficiently close together in time so that the agents act together. Co-administration encompasses administering substances together in a single formulation and administering substances in separate formulations close enough in time so that the agents act together.

[0158] As used herein, the phrase “pharmaceutically acceptable” means that which is useful in preparing a pharmaceutical composition that is generally non-toxic and is not biologically undesirable and that are not otherwise unacceptable for pharmaceutical use. Pharmaceutically acceptable generally refers to substances that are non-pyrogenic. Pharmaceutically acceptable can refer to substances that are sterile, especially for pharmaceutical substances that are for injection or infusion.

[0159] As used herein, a “subject” refers to any member of the animal kingdom. In some embodiments, “subject” refers to humans. In some embodiments, “subject” refers to non-human animals. In some embodiments, “subject” refers to primates. In some embodiments, subjects include, but are not limited to, mammals, birds, reptiles, amphibians, fish, insects, or worms. In certain embodiments, the non-human subject is a mammal (e.g., a rodent, a mouse, a rat, a rabbit, a monkey, a dog, a cat, a sheep, cattle, a primate, or a pig). In some embodiments, a subject may be a transgenic animal, genetically-engineered animal, or a clone. In certain embodiments of the present invention the subject is an adult, an adolescent, or an infant. In some embodiments, terms “individual” or “patient” are used and are intended to be interchangeable with “subject”.

[0160] As used herein, “reduced or eliminated” expression of a protein on a cell refers to a partial or complete loss of expression of the protein relative to an unmodified cell. In some embodiments, the surface expression of a protein on a cell is measured by flow cytometry and has “reduced or eliminated” surface expression relative to an unmodified cell as evidenced by a reduction in fluorescence signal upon staining with the same antibody against the protein. A cell that has “reduced or eliminated” surface expression of a protein by flow cytometry relative to an unmodified cell may be referred to as “negative” for expression of that protein as evidenced by a fluorescence signal similar to a cell stained with an isotype control antibody. The “reduction or elimination” of protein expression can be measured by other known techniques in the field with appropriate controls known to those skilled in the art. As used herein, “eliminated” expression is understood as a reduction of expression to below the level of detection of the protein by the method used.

[0161] The term “about” or “approximately” means an acceptable error for a particular value as determined by one of ordinary skill in the art, which depends in part on how the value is measured or determined, or a degree of variation that does not substantially affect the properties of the described subject matter, or within the tolerances accepted in the art, e.g., within 10%, 5%, 2%, or 1% or within two standard deviations of a set of values. Accordingly, unless indicated to the contrary, the numerical parameters set forth in the following specification and attached claims are approximations that may vary depending upon the desired properties sought to be obtained. At the very least, and not as an attempt to limit the application of the doctrine of equivalents to the scope of the claims, each numerical parameter should at least be construed in light of the number of reported significant digits and by applying ordinary rounding techniques.

[0162] Reference will now be made in detail to certain embodiments of the invention, examples of which are illustrated in the accompanying drawings. While the invention is described in conjunction with the illustrated embodiments, it will be understood that they are not intended to limit the invention to those embodiments. On the contrary, the invention is intended to cover all alternatives, modifications, and equivalents, which may be included within the invention as defined by the appended claims and included embodiments.

[0163] Before describing the present teachings in detail, it is to be understood that the disclosure is not limited to specific compositions or process steps, as such may vary. It should be noted that, as used in this specification and the appended claims, the singular form “a”, “an” and “the” include plural references unless the context clearly dictates otherwise. Thus, for example, reference to “a conjugate” includes a plurality of conjugates and reference to “a cell” includes a plurality of cells and the like.

[0164] Numeric ranges are inclusive of the numbers defining the range. Measured and measurable values are understood to be approximate, taking into account significant digits and the error associated with the measurement. Also, the use of “comprise”, “comprises”, “comprising”, “contain”, “contains”, “containing”, “include”, “includes”, and “including” are not intended to be limiting. It is to be understood that both the foregoing general description and detailed description are exemplary and explanatory only and are not restrictive of the teachings.

[0165] Unless specifically noted in the specification, embodiments in the specification that recite “comprising” various components are also contemplated as “consisting of” or “consisting essentially of” the recited components; embodiments in the specification that recite “consisting of” various components are also contemplated as “comprising” or “consisting essentially of” the recited components; and embodiments in the specification that recite “consisting essentially of” various components are also contemplated as “consisting of” or “comprising” the recited components (this interchangeability does not apply to the use of these terms in the claims).

[0166] The term “or” is used in an inclusive sense, i.e., equivalent to “and/or,” unless the context clearly indicates otherwise.

[0167] The section headings used herein are for organizational purposes only and are not to be construed as limiting the desired subject matter in any way. In the event that any material incorporated by reference contradicts any term defined in this specification or any other express content of this specification, this specification controls. While the present teachings are described in conjunction with various embodiments, it is not intended that the present teachings be limited to such embodiments. On the contrary, the present teachings encompass various alternatives, modifications, and equivalents, as will be appreciated by those of skill in the art.

### II. FIRST GENOME EDITING TOOL

[0168] In some embodiments, the first genome editing tool comprises a first genomic editor and at least one guide RNA (gRNA) that targets at least one genomic locus and that is cognate to the first genomic editor. In some embodiments, the first genome editing tool comprises a first genomic editor comprising a base editor, and at least one guide RNA (gRNA) that targets at least one genomic locus and that is cognate to the base editor.

[0169] In some embodiments, the first genomic editor is delivered to the cell as at least one polypeptide or at least one mRNA. In some embodiments, the first genomic editor comprises at least one polypeptide or at least one mRNA. In some embodiments, the first genomic editor comprises a cleavase, a nickase, a catalytically inactive nuclease, a base editor, optionally a C to T base editor or an A to G base editor, or a fusion protein comprising a DNA polymerase and a nickase.

[0170] In some embodiments, the first genomic editor comprises a Cas nuclease. In some embodiments, the Cas nuclease is a Cas9. In some embodiments, the Cas9 is Streptococcus pyogenes Cas9 (SpyCas9), S. aureus Cas9 (SauCas9), C. diphtheriae Cas9 (CdiCas9), Streptococcus thermophilus Cas9 (St1Cas9), A. cellulolyticus Cas9 (AceCas9), C. jejuni Cas9 (CjeCas9). R. palustris Cas9 (RpaCas9), R. rubrum Cas9 (RruCas9), A. naeslundii Cas9 (AnaCas9), Francisella novicida Cas9 (FnoCas9), or N. meningitidis (NmeCas9). In some embodiments, the Cas9 is an Nme1Cas9, an Nme2Cas9, an Nme3Cas9, or SpyCas9. In some embodiments, the Cas nuclease is a Class 2 Cas nuclease. In some embodiments, the Cas nuclease is a Cas12. In some embodiments, the Cas12 is Lachnospiraceae bacterium Cas12a (LbCas12a) or the Cas12 is Acidaminococcus sp. Cas12a (AsCas12a). In some embodiments, the Cas nuclease is an Eubacterium siraeum Cas13d (EsCas13d).

[0171] In some embodiments, the first genomic editor or the base editor comprises a cytidine deaminase (e.g., A3A). In some embodiments, the first genomic editor or the base editor comprises a cytidine deaminase (including any one of the cytidine deaminases disclosed herein, e.g., A3A), and an RNA-guided nickase (including any one of the RNA-guided nickases disclosed herein). In some embodiments, the base editor is a C to T base editor, optionally comprising a cytidine deaminase, or an A to G base editor, optionally comprising an adenosine deaminase.

[0172] In some embodiments, the first genomic editing tool may be combined with any second genomic editing tool disclosed herein.

### A. UGI

[0173] In some embodiments, the first genome editing tool comprises a uracil glycosylase inhibitor (UGI), and the UGI and the base editor are comprised in a single polypeptide. In some embodiments, the first genome editing tool comprises a UGI, and the UGI and the base editor are comprised in different polypeptides. In some embodiments, the base editor comprises a cytidine deaminase and an RNA-guided nickase. In some embodiments, the cytidine deaminase, the RNA-guided nickase, and the UGI are comprised in a single polypeptide. In some embodiments, the cytidine deaminase, the RNA-guided nickase, and the UGI are comprised in different polypeptides. In some embodiments, the cytidine deaminase and the RNA-guided nickase are comprised in a single polypeptide, and wherein the UGI is comprised in a different polypeptide.

[0174] Without being bound by any theory, providing a UGI together with a polypeptide comprising a deaminase may be helpful in the methods described herein by inhibiting cellular DNA repair machinery (e.g., UDG and downstream repair effectors) that recognize a uracil in DNA as a form of DNA damage or otherwise would excise or modify the uracil and/or surrounding nucleotides. It should be understood that the use of a UGI may increase the editing efficiency of an enzyme that is capable of deaminating C residues.

[0175] Suitable UGI protein and nucleotide sequences are provided herein and additional suitable UGI sequences are known to those in the art, and include, for example, those published in Wang et al., Uracil-DNA glycosylase inhibitor gene of bacteriophage PBS2 encodes a binding protein specific for uracil-DNA glycosylase. J. Biol. Chem. 264: 1163-1171(1989); Lundquist et al., Site-directed mutagenesis and characterization of uracil-DNA glycosylase inhibitor protein. Role of specific carboxylic amino acids in complex formation with Escherichia coli uracil-DNA glycosylase. J. Biol. Chem. 272:21408-21419(1997); Ravishankar et al., X-ray analysis of a complex of Escherichia coli uracil DNA glycosylase (EcUDG) with a proteinaceous inhibitor. The structure elucidation of a prokaryotic UDG. Nucleic Acids Res. 26:4880-4887(1998); and Putnam et al., Protein mimicry of DNA from crystal structures of the uracil-DNA glycosylase inhibitor protein and its complex with Escherichia coli uracil-DNA glycosylase. J. Mol. Biol. 287:331-346(1999), the entire contents of each are incorporated herein by reference. It should be appreciated that any proteins that are capable of inhibiting a uracil-DNA glycosylase base-excision repair enzyme are within the scope of the present disclosure. Additionally, any proteins that block or inhibit base-excision repair are also within the scope of this disclosure. In some embodiments, a uracil glycosylase inhibitor is a protein that binds uracil. In some embodiments, a uracil glycosylase inhibitor is a protein that binds uracil in DNA. In some embodiments, a uracil glycosylase inhibitor is a single-stranded binding protein. In some embodiments, a uracil glycosylase inhibitor is a catalytically inactive uracil DNA-glycosylase protein. In some embodiments, a uracil glycosylase inhibitor is a catalytically inactive uracil DNA-glycosylase protein that does not excise uracil from the DNA. In some embodiments, a uracil glycosylase inhibitor is a catalytically inactive UDG.

[0176] In some embodiments, a uracil glycosylase inhibitor (UGI) disclosed herein comprises an amino acid sequence with at least 80% to SEQ ID NO: 15 or 24. In some embodiments, any of the foregoing levels of identity is at least 90%, at least 95%, at least 98%, at least 99%, or 100%. In some embodiments, the UGI comprises an amino acid sequence with at least 90% identity to SEQ ID NO: 15 or 24. In some embodiments, the UGI comprises an amino acid sequence with at least 95% identity to SEQ ID NO: 15 or 24. In some embodiments, the UGI comprises an amino acid sequence with at least 98% identity to SEQ ID NO: 15 or 24. In some embodiments, the UGI comprises an amino acid sequence with at least 99% identity to SEQ ID NO: 15 or 24. In some embodiments, the UGI comprises the amino acid sequence of SEQ ID NO: 15 or 24.

### B. Cytidine Deaminase

[0177] Cytidine deaminases encompass enzymes in the cytidine deaminase superfamily, and in particular, enzymes of the APOBEC family (APOBEC1, APOBEC2, APOBEC4, and APOBEC3 subgroups of enzymes), activation-induced cytidine deaminase (AID or AICDA) and CMP deaminases (see, e.g., Conticello et al., Mol. Biol. Evol. 22:367-77, 2005; Conticello, Genome Biol. 9:229, 2008; Muramatsu et al., J. Biol. Chem. 274: 18470-6, 1999); and Carrington et al., Cells 9:1690 (2020)).

[0178] In some embodiments, the cytidine deaminase disclosed herein is an enzyme of APOBEC family. In some embodiments, the cytidine deaminase disclosed herein is an enzyme of APOBEC1, APOBEC2, APOBEC4, and APOBEC3 subgroups. In some embodiments, the cytidine deaminase disclosed herein is an enzyme of APOBEC3 subgroup. In some embodiments, the cytidine deaminase disclosed herein is an APOBEC3A deaminase (A3A).

[0179] In some embodiments, the cytidine deaminase is a cytidine deaminase comprising an amino acid sequence having at least 80%, 85% 87%, 90%, 95%, 98%, 99%, or 100% identity to SEQ ID NO: 22.

### 1. APOBEC3A Deaminase

[0180] In some embodiments, an APOBEC3A deaminase (A3A) disclosed herein is a human A3A. In some embodiments, the A3A is a wild-type A3A.

[0181] In some embodiment, the A3A is an A3A variant. A3A variants share homology to wild-type A3A, or a fragment thereof. In some embodiments, a A3A variant has at least about 80% identity, at least about 85% identity, at least about 90% identity, at least about 95% identity, at least about 96% identity, at least about 97% identity, at least about 98% identity, at least about 99% identity, at least about 99.5% identity, or at least about 99.9% identity to a wild type A3A. In some embodiments, the A3A variant may have 1, 2, 3, 4, 5, 6, 7, 8, 9, 10, 11, 12, 13, 14, 15, 16, 17, 18, 19, 20, 21, 22, 21, 24, 25, 26, 27, 28, 29, 30, 31, 32, 33, 34, 35, 36, 37, 38, 39, 40, 41, 42, 43, 44, 45, 46, 47, 48, 49, 50 or more amino acid changes compared to a wild type A3A. In some embodiments, the A3A variant comprises a fragment of an A3A, such that the fragment has at least about 80% identity, at least about 90% identity, at least about 95% identity, at least about 96% identity, at least about 97% identity, at least about 98% identity, at least about 99% identity, at least about 99.5% identity, or at least about 99.9% identity to the corresponding fragment of a wild-type A3A.

[0182] In some embodiments, an A3A variant is a protein having a sequence that differs from a wild-type A3A protein by one or several mutations, such as substitutions, deletions, insertions, one or several single point substitutions. In some embodiments, a shortened A3A sequence could be used, e.g., by deleting N-terminal, C-terminal, or internal amino acids. In some embodiments, a shortened A3A sequence is used where one to four amino acids at the C-terminus of the sequence is deleted. In some embodiments, an APOBEC3A (such as a human APOBEC3A) has a wild-type amino acid position 57 (as numbered in the wild-type sequence). In some embodiments, an APOBEC3A (such as a human APOBEC3A) has an asparagine at amino acid position 57 (as numbered in the wild-type sequence).

[0183] In some embodiments, the wild-type A3A is a human A3A (UniPROT accession ID: p319411, SEQ ID NO: 22).

[0184] In some embodiments, the A3A disclosed herein comprises an amino acid sequence having at least 80% identity to SEQ ID NO: 22. In some embodiments, the level of identity is at least 85%, at least 87%, at least 90%, at least 95%, at least 98%, at least 99%, or 100%. In some embodiments, the A3A comprises an amino acid sequence having at least 87% identity to SEQ ID NO: 22. In some embodiments, the A3A comprises an amino acid sequence with at least 90% identity to SEQ ID NO: 22. In some embodiments, the A3A comprises an amino acid sequence with at least 95% identity to SEQ ID NO: 22. In some embodiments, the A3A comprises an amino acid sequence with at least 98% identity to SEQ ID NO: 22. In some embodiments, the A3A comprises an amino acid sequence with at least 99% identity to A3A SEQ ID NO: 22. In some embodiments, the A3A comprises the amino acid sequence of SEQ ID NO: 22.

### C. Linkers

[0185] In some embodiments, the first genomic editor or the base editor described herein further comprises a linker that connects the deaminase and the RNA-guided nickase. In some embodiments, the linker is an organic molecule, polymer, or chemical moiety. In some embodiments, the linker is a peptide linker. In some embodiments, the nucleic acid encoding the polypeptide comprising the deaminase and the RNA-guided nickase further comprises a sequence encoding the peptide linker. mRNAs encoding the deaminase-linker-RNA-guided nickase fusion protein are provided.

[0186] In some embodiments, the peptide linker is any stretch of amino acids having at least 1, at least 2, at least 3, at least 4, at least 5, at least 6, at least 7, at least 8, at least 9, at least 10, at least 15, at least 20, at least 25, at least 30, at least 40, at least 50, or more amino acids.

[0187] In some embodiments, the peptide linker is the 16 residue “XTEN” linker, or a variant thereof (See, e.g., Schellenberger et al. A recombinant polypeptide extends the in vivo half-life of peptides and proteins in a tunable manner. Nat. Biotechnol. 27, 1186-1190 (2009)). In some embodiments, the XTEN linker comprises a sequence that is any one of SGSETPGTSESATPES (SEQ ID NO: 25), SGSETPGTSESA (SEQ ID NO: 26), or SGSETPGTSESATPEGGSGGS (SEQ ID NO: 27). In some embodiments, the XTEN linker consists of the sequence SGSETPGTSESATPES (SEQ ID NO: 25), SGSETPGTSESA (SEQ ID NO: 26), or SGSETPGTSESATPEGGSGGS (SEQ ID NO: 27).

[0188] In some embodiments, the peptide linker comprises a (GGGGS)ₙ (e.g., SEQ ID NOs: 73, 77, 82, 101), a (G)ₙ, an (EAAAK)ₙ (e.g., SEQ ID NOs: 74, 80, 128), a (GGS)ₙ, an SGSETPGTSESATPES (SEQ ID NO: 25) motif (see, e.g., Guilinger J P, Thompson D B, Liu D R. Fusion of catalytically inactive Cas9 to FokI nuclease improves the specificity of genome modification. Nat. Biotechnol. 2014; 32(6): 577-82; the entire contents are incorporated herein by reference), or an (XP)ₙ motif (SEQ ID NO: 407), or a combination of any of these, wherein n is independently an integer between 1 and 30. See, WO2015089406, e.g., paragraph [0012], the entire content of which is incorporated herein by reference.

[0189] In some embodiments, the peptide linker comprises one or more sequences selected from SEQ ID NOs: 25-39 and 72-133. In some embodiments, the peptide linker comprises one or more sequences selected from SEQ ID NO: 25, SEQ ID NO: 26, SEQ ID NO: 27, SEQ ID NO: 129, SEQ ID NO: 130, SEQ ID NO: 131. SEQ ID NO: 132 and SEQ ID NO: 133. In some embodiments, the peptide linker comprises a sequence of SEQ ID NO: 129.

### D. RNA-Guided Nickase

[0190] In some embodiments, an RNA-guided nickase disclosed herein is a Cas nickase. In some embodiments, an RNA-guided nickase is from a specific Cas nuclease with its catalytic domain(s) being inactivated. In some embodiments, the RNA-guided nickase is a Class 2 Cas nickase, such as a Cas9 nickase or a Cpf1 nickase. In some embodiments, the RNA-guided nickase is an S. pyogenes Cas9 nickase. In some embodiments, the RNA-guided nickase is Neisseria meningitidis Cas9 nickase.

[0191] In some embodiments, the RNA-guided nickase is a modified Class 2 Cas protein or derived from a Class 2 Cas protein. In some embodiments, the RNA-guided nickase is modified or derived from a Cas protein, such as a Class 2 Cas nuclease (which may be, e.g., a Cas nuclease of Type II, V, or VI). Class 2 Cas nuclease include, for example, Cas9, Cpf1 (Cas12a), C2c1, C2c2, and C2c3 proteins and modifications thereof. Examples of Cas9 nucleases include those of the type II CRISPR systems of S. pyogenes, S. aureus, and other prokaryotes (see, e.g., the list in the next paragraph), and modified (e.g., engineered or mutant) versions thereof. See, e.g., US2016/0312198 A1; US 2016/0312199 A1, which is incorporated by reference in its entirety. Other examples of Cas nucleases include a Csm or Cmr complex of a type III CRISPR system or the Cas10, Csm1, or Cmr2 subunit thereof, and a Cascade complex of a type I CRISPR system, or the Cas3 subunit thereof. In some embodiments, the Cas nuclease may be from a Type-IIA, Type-IIB, or Type-IIC system. For discussion of various CRISPR systems and Cas nucleases, see, e.g., Makarova et al., NAT. REV. MICROBIOL. 9:467-477 (2011); Makarova et al., NAT. REV. MICROBIOL, 13: 722-36 (2015); Shmakov et al., MOLECULAR CELL, 60:385-397 (2015).

[0192] A Cas nickase described herein may be a nickase form of a Cas nuclease from the species including, but not limited to, Streptococcus pyogenes, Streptococcus thermophilus, Streptococcus sp., Staphylococcus aureus, Listeria innocua, Lactobacillus gasseri, Francisella novicida, Wolinella succinogenes, Sutterella wadsworthensis, Gammaproteobacterium, Neisseria meningitidis, Campylobacter jejuni, Pasteurella multocida, Fibrobacter succinogene, Rhodospirillum rubrum, Nocardiopsis dassonvillei, Streptomyces pristinaespiralis, Streptomyces viridochromogenes, Streptomyces viridochromogenes, Streptosporangium roseum, Streptosporangium roseum, Alicyclobacillus acidocaldarius, Bacillus pseudomycoides, Bacillus selenitireducens, Exiguobacterium sibiricum, Lactobacillus delbrueckii, Lactobacillus salivarius, Lactobacillus buchneri, Treponema denticola, Microscilla marina, Burkholderiales bacterium, Polaromonas naphthalenivorans, Polaromonas sp., Crocosphaera watsonii, Cyanothece sp., Microcystis aeruginosa, Synechococcus sp., Acetohalobium arabaticum, Ammonifex degensii, Caldicelulosiruptor becscii, Candidatus Desulforudis, Clostridium botulinum, Clostridium difficile, Finegoldia magna, Natranaerobius thermophilus, Pelotomaculum thermopropionicum, Acidithiobacillus caldus, Acidithiobacillus ferrooxidans, Allochromatium vinosum, Marinobacter sp., Nitrosococcus halophilus, Nitrosococcus watsoni, Pseudoalteromonas haloplanktis, Ktedonobacter racemifer, Methanohalobium evestigatum, Anabaena variabilis, Nodularia spumigena, Nostoc sp., Arthrospira maxima, Arthrospira platensis, Arthrospira sp., Lyngbya sp., Microcoleus chthonoplastes, Oscillatoria sp., Petrotoga mobilis, Thermosipho africanus, Streptococcus pasteurianus, Neisseria cinerea, Campylobacter lari, Parvibaculum lavamentivorans, Corynebacterium diphtheria, Acidaminococcus sp., Lachnospiraceae bacterium ND2006, or Acaryochloris marina.

[0193] In some embodiments, the Cas nickase is a nickase form of the Cas9 nuclease from Streptococcus pyogenes. In some embodiments, the Cas nickase is a nickase form of the Cas9 nuclease from Streptococcus thermophilus. In some embodiments, the Cas nickase is a nickase form of the Cas9 nuclease from Neisseria meningitidis. See e.g., WO/2020081568, describing an Nme2Cas9 D16A nickase. In some embodiments, the Cas nickase is a nickase form of the Cas9 nuclease from Staphylococcus aureus. In some embodiments, the Cas nickase is a nickase form of the Cpf1 nuclease from Francisella novicida. In some embodiments, the Cas nickase is a nickase form of the Cpf1 nuclease from Acidaminococcus sp. In some embodiments, the Cas nickase is a nickase form of the Cpf1 nuclease from Lachnospiraceae bacterium ND2006. In further embodiments, the Cas nickase is a nickase form of the Cpf1 nuclease from Francisella tularensis, Lachnospiraceae bacterium, Butyrivibrio proteoclasticus, Peregrinibacteria bacterium, Parcubacteria bacterium, Smithella, Acidaminococcus, Candidatus Methanoplasma termitum, Eubacterium eligens, Moraxella bovoculi, Leptospira inadai, Porphyromonas crevioricanis, Prevotella disiens, or Porphyromonas macacae. In certain embodiments, the Cas nickase is a nickase form of a Cpf1 nuclease from an Acidaminococcus or Lachnospiraceae. As discussed elsewhere, a nickase may be derived from (i.e., related to) a specific Cas nuclease in that the nickase is a form of the nuclease in which one of its two catalytic domains is inactivated, e.g., by mutating an active site residue essential for nucleolysis, such as D10, H840, or N863 in Spy Cas9. One skilled in the art will be familiar with techniques for easily identifying corresponding residues in other Cas proteins, such as sequence alignment and structural alignment, which is discussed in detail below.

[0194] In other embodiments, the Cas nickase may relate to a Type-I CRISPR/Cas system. In some embodiments, the Cas nickase may be a component of the Cascade complex of a Type-I CRISPR/Cas system. In some embodiments, the Cas nickase may be a Cas3 protein. In some embodiments, the Cas nickase may be from a Type-III CRISPR/Cas system.

[0195] In some embodiments, a Cas nickase is a nickase form of a Cas nuclease or a modified Cas nuclease in which an endonucleolytic active site is inactivated, e.g., by one or more alterations (e.g., point mutations) in a catalytic domain. See, e.g., U.S. Pat. No. 8,889,356 for discussion of Cas nickases and exemplary catalytic domain alterations.

[0196] Wild type S. pyogenes Cas9 has two catalytic domains: RuvC and HNH. The RuvC domain cleaves the non-target DNA strand, and the HNH domain cleaves the target strand of DNA. In some embodiments, a Cas nuclease may comprise an amino acid substitution in the RuvC or RuvC-like nuclease domain. Exemplary amino acid substitutions in the RuvC or RuvC-like nuclease domain include D10A (based on the S. pyogenes Cas9 protein). See, e.g., Zetsche et al. (2015) Cell Oct. 22:163(3): 759-771. In some embodiments, the Cas nuclease may comprise an amino acid substitution in the HNH or HNH-like nuclease domain. Exemplary amino acid substitutions in the HNH or HNH-like nuclease domain include E762A, H840A, N863A, H983A, and D986A (based on the S. pyogenes Cas9 protein). See, e.g., Zetsche et al. (2015). Exemplary amino acid substitutions in the HNH or HNH-like nuclease domain or RuvC or RuvC-like domains for N. meningitidis include Nme2Cas9D16A (HNH nickase) and Nme2Cas9H588A (RuvC nickase). Further exemplary amino acid substitutions include D917A, E1006A, and D1255A (based on the Francisella novicida U112 Cpf1 (FnCpf1) sequence (UniProtKB-AOQ7Q2 (CPF1_FRATN)).

[0197] In some embodiments, a Cas nickase such as a Cas9 nickase has an inactivated RuvC or HNH domain. In some embodiments, a nickase is used having a RuvC domain with reduced activity. In some embodiments, a nickase is used having an inactive RuvC domain.

[0198] In some embodiments, a nickase is used having an HNH domain with reduced activity. In some embodiments, a nickase is used having an inactive HNH domain.

[0199] In some embodiments, a Cas9 nickase has an active HNH nuclease domain and is able to cleave the non-targeted strand of DNA, i.e., the strand bound by the gRNA and has an inactive RuvC nuclease domain and is not able to cleave the targeted strand of the DNA, i.e., the strand where base editing by deaminase is desired.

[0200] An exemplary Cas9 nickase amino acid sequence is provided as SEQ ID NO: 41. An exemplary Cas9 nickase mRNA coding sequence, suitable for inclusion in a fusion protein, is provided as SEQ ID NO: 42.

[0201] In some embodiments, the RNA-guided nickase is a Class 2 Cas nickase described herein. In some embodiments, the RNA-guided nickase is a Cas9 nickase described herein.

[0202] In some embodiments, the RNA-guided nickase is an S. pyogenes Cas9 nickase described herein.

[0203] In some embodiments, the RNA-guided nickase is a D10A SpyCas9 nickase described herein. In some embodiments, the RNA-guided nickase comprises an amino acid sequence having at least 80%, 90%, 95%, 98%, or 99% identity to any one of SEQ ID NO: 41, 43, or 45. In some embodiments, the RNA-guided nickase comprises the amino acid sequence of SEQ ID NO: 41.

[0204] In some embodiments, the nucleic acid or the first ORF encoding the polypeptide comprises a nucleotide sequence having at least 80%, 90%, 95%, 98%, 99% or 100% identity to the nucleotide sequence of any one of SEQ ID NOs: 42, 44, or 46. In some embodiments, the nucleic acid or the first ORF encoding the polypeptide comprises a nucleotide sequence having at least 80%, 90%, 95%, 98%, 99% or 100% identity to the nucleotide sequence of any one of SEQ ID NOs: 42, 44, and 46-58. In some embodiments, the level of identity is at least 90%. In some embodiments, the level of identity is at least 95%. In some embodiments, the level of identity is at least 98%. In some embodiments, the level of identity is at least 99%. In some embodiments, the level of identity is at least 100%. In some embodiments, the sequence encoding the RNA-guided nickase comprises the nucleotide sequence of any one of SEQ ID NOs: 42, 44, and 46.

[0205] In some embodiments, the RNA-guided nickase is Neisseria meningitidis (Nine) Cas9 nickase described herein.

[0206] In some embodiments, the RNA-guided nickase is a D16A NmeCas9 nickase described herein. In some embodiments, the D16A NmeCas9 nickase is a D16A Nme2Cas9 nickase. In some embodiments, the D16A Nme2Cas9 nickase comprises an amino acid sequence at least 80%, 90%, 95%, 98%, 99% or 100% identical to SEQ ID NO: 149. In some embodiments, the sequence encoding the D16A Nme2Cas9 comprises a nucleotide sequence at least 80%, 90%, 95%, 98%, 99% or 100% identical to any one of SEQ ID NOs: 150-155.

### E. Compositions Comprising a Cytidine Deaminase and an RNA-Guided Nickase

[0207] In some embodiments, the first genome editing tool comprises a first genomic editor and at least one guide RNA (gRNA) that targets at least one genomic locus and that is cognate to the first genomic editor. In some embodiments, the first genome editing tool comprises a first genomic editor comprising a base editor, and at least one guide RNA (gRNA) that targets at least one genomic locus and that is cognate to the base editor.

[0208] In some embodiments, the first genome editing tool comprises a uracil glycosylase inhibitor (UGI), and the UGI and the base editor are comprised in a single polypeptide. In some embodiments, the first genome editing tool comprises a UGI, and the UGI and the base editor are comprised in different polypeptides. In some embodiments, the base editor comprises a cytidine deaminase and an RNA-guided nickase. In some embodiments, the cytidine deaminase, the RNA-guided nickase, and the UGI are comprised in a single polypeptide. In some embodiments, the cytidine deaminase, the RNA-guided nickase, and the UGI are comprised in different polypeptides. In some embodiments, the cytidine deaminase and the RNA-guided nickase are comprised in a single polypeptide, and wherein the UGI is comprised in a different polypeptide.

### 1. Exemplary Compositions

[0209] In some embodiments, a first genomic editor (e.g., base editor) comprising a deaminase (e.g., a cytidine deaminase) and an RNA-guided nickase is provided. In some embodiments, an enzyme of APOBEC family and an RNA-guided nickase is provided. In some embodiments, the first genomic editor comprises an enzyme of APOBEC1 subgroup and an RNA-guided nickase. In some embodiments, the first genomic editor comprises an enzyme of APOBEC2 subgroup and an RNA-guided nickase. In some embodiments, the first genomic editor comprises an enzyme of APOBEC4 subgroup and an RNA-guided nickase. In some embodiments, the first genomic editor comprises an enzyme of APOBEC3 subgroup and an RNA-guided nickase.

[0210] In some embodiments, a first genomic editor or a base editor comprising a deaminase (e.g., a cytidine deaminase) and an RNA-guided nickase is provided. In some embodiments, an enzyme of APOBEC family and a D10A SpyCas9 nickase is provided. In some embodiments, the first genomic editor comprises an enzyme of APOBEC1 subgroup and a D10A SpyCas9 nickase. In some embodiments, the first genomic editor comprises an enzyme of APOBEC2 subgroup and a D10A SpyCas9 nickase. In some embodiments, the first genomic editor comprises an enzyme of APOBEC4 subgroup and a D10A SpyCas9 nickase. In some embodiments, the first genomic editor comprises an enzyme of APOBEC3 subgroup and a D10A SpyCas9 nickase.

[0211] In some embodiments, a first genomic editor or a base editor comprising a deaminase (e.g., a cytidine deaminase) and an RNA-guided nickase is provided. In some embodiments, an enzyme of APOBEC family and a D16A NmeCas9 nickase is provided. In some embodiments, an enzyme of APOBEC family and a D16A Nme2Cas9 nickase is provided. In some embodiments, the first genomic editor comprises an enzyme of APOBEC1 subgroup and a D16A Nme2Cas9 nickase. In some embodiments, the first genomic editor comprises an enzyme of APOBEC2 subgroup and a D16A Nme2Cas9 nickase. In some embodiments, the first genomic editor comprises an enzyme of APOBEC4 subgroup and a D16A Nme2Cas9 nickase. In some embodiments, the first genomic editor comprises an enzyme of APOBEC3 subgroup and a D16A Nme2Cas9 nickase.

[0212] In some embodiments, the first genomic editor lacks a UGI. In some embodiments, the first genomic editor contains one or more UGIs.

[0213] In some embodiments, the cytidine deaminase and the RNA-guided nickase are linked via a linker. In some embodiments, the cytidine deaminase and the RNA-guided nickase are linked via a peptide linker. In some embodiments, the peptide linker comprises one or more sequences selected from SEQ ID NOs: 25-39 and 72-133.

[0214] In some embodiments, the first genomic editor further comprises one or more additional heterologous functional domains. In some embodiments, the first genomic editor further comprises one or more nuclear localization sequences (NLSs) (described herein) at the C-terminal of the polypeptide or the N-terminal of the polypeptide.

[0215] In some embodiments, a first genomic editor or a base editor comprising a deaminase (e.g., a cytidine deaminase) and an RNA-guided nickase is provided. In some embodiments, an enzyme of APOBEC family and an RNA-guided nickase is provided. In some embodiments, the first genomic editor comprises an enzyme of APOBEC1 subgroup and an RNA-guided nickase. In some embodiments, the first genomic editor comprises an enzyme of APOBEC2 subgroup and an RNA-guided nickase. In some embodiments, the first genomic editor comprises an enzyme of APOBEC4 subgroup and an RNA-guided nickase. In some embodiments, the first genomic editor comprises an enzyme of APOBEC3 subgroup and an RNA-guided nickase.

[0216] In some embodiments, a first genomic editor or a base editor comprising a deaminase (e.g., a cytidine deaminase) and an RNA-guided nickase is provided. In some embodiments, an enzyme of APOBEC family and a D10A SpyCas9 nickase, wherein the enzyme of APOBEC family and the D10A SpyCas9 nickase are fused via a linker. In some embodiments, the first genomic editor comprises an enzyme of APOBEC family and a D10A SpyCas9 nickase, and a nuclear localization sequence (NLS) at the C-terminus of the fused polypeptide. In some embodiments, the first genomic editor comprises an enzyme of APOBEC family and a D10A SpyCas9 nickase, and a NLS at the N-terminus of the fused polypeptide. In some embodiments, the first genomic editor comprises an enzyme of APOBEC family and a D10A SpyCas9 nickase, wherein the enzyme of APOBEC family and the D10A SpyCas9 nickase are fused via a linker, and a NLS fused to the C-terminus of the D10A SpyCas9 nickase, optionally via a linker. In some embodiments, the first genomic editor comprises an enzyme of APOBEC family and a D10A SpyCas9 nickase, wherein the enzyme of APOBEC family and the D10A SpyCas9 nickase are fused via a linker, and a NLS fused to the C-terminus of the D10A SpyCas9 nickase, optionally via a linker.

[0217] In some embodiments, the first genomic editor comprises an enzyme of APOBEC family and a D16A NmeCas9 nickase, wherein the enzyme of APOBEC family and the D16A NmeCas9 nickase are fused via a linker. In some embodiments, the first genomic editor comprises an enzyme of APOBEC family and a D16A Nme2Cas9 nickase, wherein the enzyme of APOBEC family and the D16A Nme2Cas9 nickase are fused via a linker. In some embodiments, the first genomic editor comprises an enzyme of APOBEC family and a D16A Nme2Cas9 nickase, and a nuclear localization sequence (NLS) at the C-terminus of the fused polypeptide. In some embodiments, the first genomic editor comprises an enzyme of APOBEC family and a D16A Nme2Cas9 nickase, and a NLS at the N-terminus of the fused polypeptide. In some embodiments, the first genomic editor comprises an enzyme of APOBEC family and a D16A Nme2Cas9 nickase, wherein the enzyme of APOBEC family and the D16A Nme2Cas9 nickase are fused via a linker, and a NLS fused to the C-terminus of the D16A Nme2Cas9 nickase, optionally via a linker. In some embodiments, the first genomic editor comprises an enzyme of APOBEC family and a D16A Nme2Cas9 nickase, wherein the enzyme of APOBEC family and the D16A Nme2Cas9 nickase are fused via a linker, and a NLS fused to the C-terminus of the D16A Nme2Cas9 nickase, optionally via a linker.

[0218] In some embodiments, the first genomic editor comprises an enzyme of APOBEC1 subgroup and a D10A SpyCas9 nickase, wherein the enzyme of APOBEC1 subgroup and the D10A SpyCas9 nickase are fused via a linker. In some embodiments, the first genomic editor comprises an enzyme of APOBEC1 subgroup and a D10A SpyCas9 nickase, and a nuclear localization sequence (NLS) at the C-terminus of the fused polypeptide. In some embodiments, the first genomic editor comprises an enzyme of APOBEC1 subgroup and a D10A SpyCas9 nickase, and a NLS at the N-terminus of the fused polypeptide. In some embodiments, the first genomic editor comprises an enzyme of APOBEC1 subgroup and a D10A SpyCas9 nickase, wherein the enzyme of APOBEC1 subgroup and the D10A SpyCas9 nickase are fused via a linker, and a NLS fused to the C-terminus of the D10A SpyCas9 nickase, optionally via a linker. In some embodiments, the first genomic editor comprises an enzyme of APOBEC1 subgroup and a D10A SpyCas9 nickase, wherein the enzyme of APOBEC1 subgroup and the D10A SpyCas9 nickase are fused via a linker, and a NLS fused to the C-terminus of the D10A SpyCas9 nickase, optionally via a linker.

[0219] In some embodiments, the first genomic editor comprises an enzyme of APOBEC1 subgroup and a D16A Nme2Cas9 nickase, wherein the enzyme of APOBEC1 subgroup and the D16A Nme2Cas9 nickase are fused via a linker. In some embodiments, the first genomic editor comprises an enzyme of APOBEC1 subgroup and a D16A Nme2Cas9 nickase, wherein the enzyme of APOBEC1 subgroup and the D16A Nme2Cas9 nickase are fused via a linker. In some embodiments, the first genomic editor comprises an enzyme of APOBEC1 subgroup and a D16A Nme2Cas9 nickase, and a nuclear localization sequence (NLS) at the C-terminus of the fused polypeptide. In some embodiments, the first genomic editor comprises an enzyme of APOBEC1 subgroup and a D16A Nme2Cas9 nickase, and a NLS at the N-terminus of the fused polypeptide. In some embodiments, the first genomic editor comprises an enzyme of APOBEC1 subgroup and a D16A Nme2Cas9 nickase, wherein the enzyme of APOBEC1 subgroup and the D16A Nme2Cas9 nickase are fused via a linker, and a NLS fused to the C-terminus of the D16A Nme2Cas9 nickase, optionally via a linker. In some embodiments, the first genomic editor comprises an enzyme of APOBEC1 subgroup and a D16A Nme2Cas9 nickase, wherein the enzyme of APOBEC1 subgroup and the D16A Nme2Cas9 nickase are fused via a linker, and a NLS fused to the C-terminus of the D16A Nme2Cas9 nickase, optionally via a linker.

[0220] In some embodiments, the first genomic editor comprises an enzyme of APOBEC3 subgroup and a D10A SpyCas9 nickase, wherein the enzyme of APOBEC3 subgroup and the D10A SpyCas9 nickase are fused via a linker. In some embodiments, the first genomic editor comprises an enzyme of APOBEC3 subgroup and a D10A SpyCas9 nickase, and a nuclear localization sequence (NLS) at the C-terminus of the fused polypeptide. In some embodiments, the first genomic editor comprises an enzyme of APOBEC3 subgroup and a D10A SpyCas9 nickase, and a NLS at the N-terminus of the fused polypeptide. In some embodiments, the first genomic editor comprises an enzyme of APOBEC3 subgroup and a D10A SpyCas9 nickase, wherein the enzyme of APOBEC3 subgroup and the D10A SpyCas9 nickase are fused via a linker, and a NLS fused to the C-terminus of the D10A SpyCas9 nickase, optionally via a linker. In some embodiments, the first genomic editor comprises an enzyme of APOBEC3 subgroup and a D10A SpyCas9 nickase, wherein the enzyme of APOBEC3 subgroup and the D10A SpyCas9 nickase are fused via a linker, and a NLS fused to the C-terminus of the D10A SpyCas9 nickase, optionally via a linker.

[0221] In some embodiments, the first genomic editor comprises an enzyme of APOBEC3 subgroup and a D16A Nme2Cas9 nickase, wherein the enzyme of APOBEC3 subgroup and the D16A Nme2Cas9 nickase are fused via a linker. In some embodiments, the first genomic editor comprises an enzyme of APOBEC3 subgroup and a D16A Nme2Cas9 nickase, wherein the enzyme of APOBEC3 subgroup and the D16A Nme2Cas9 nickase are fused via a linker. In some embodiments, the first genomic editor comprises an enzyme of APOBEC3 subgroup and a D16A Nme2Cas9 nickase, and a nuclear localization sequence (NLS) at the C-terminus of the fused polypeptide. In some embodiments, the first genomic editor comprises an enzyme of APOBEC3 subgroup and a D16A Nme2Cas9 nickase, and a NLS at the N-terminus of the fused polypeptide. In some embodiments, the first genomic editor comprises an enzyme of APOBEC3 subgroup and a D16A Nme2Cas9 nickase, wherein the enzyme of APOBEC3 subgroup and the D16A Nme2Cas9 nickase are fused via a linker, and a NLS fused to the C-terminus of the D16A Nme2Cas9 nickase, optionally via a linker. In some embodiments, the first genomic editor comprises an enzyme of APOBEC3 subgroup and a D16A Nme2Cas9 nickase, wherein the enzyme of APOBEC3 subgroup and the D16A Nme2Cas9 nickase are fused via a linker, and a NLS fused to the C-terminus of the D16A Nme2Cas9 nickase, optionally via a linker.

[0222] In some embodiments, the first genomic editor comprises a D10A SpyCas9 nickase, a linker comprising the amino acid sequence of SEQ ID NO: 129, and a cytidine deaminase comprising an amino acid sequence that is at least 85% identical to SEQ ID NO: 22. In some embodiments, the first genomic editor comprises a D10A SpyCas9 nickase, a linker comprising the amino acid sequence of SEQ ID NO: 130, and a cytidine deaminase comprising an amino acid sequence that is at least 85% identical to SEQ ID NO: 22. In some embodiments, the first genomic editor comprises a D10A SpyCas9 nickase, a linker comprising the amino acid sequence of SEQ ID NO: 131, and a cytidine deaminase comprising an amino acid sequence that is at least 85% identical to SEQ ID NO: 22. In some embodiments, the first genomic editor comprises a D10A SpyCas9 nickase, a linker comprising the amino acid sequence of SEQ ID NO: 132, and a cytidine deaminase comprising an amino acid sequence that is at least 85% identical to SEQ ID NO: 22. In some embodiments, the first genomic editor comprises a D10A SpyCas9 nickase, a linker comprising the amino acid sequence of SEQ ID NO: 133, and a cytidine deaminase comprising an amino acid sequence that is at least 85% identical to SEQ ID NO: 22. In any of the foregoing embodiments, the D10A SpyCas9 nickase may comprise an amino acid sequence that is at least 85%, at least 90%, at least 95%, at least 98%, at least 99%, or 100% identical to any one of SEQ ID NOs: 41, 43, and 45.

[0223] In some embodiments, the first genomic editor comprises a D16A Nme2Cas9 nickase, a linker comprising the amino acid sequence of SEQ ID NO: 129, and a cytidine deaminase comprising an amino acid sequence that is at least 85% identical to SEQ ID NO: 22. In some embodiments, the first genomic editor comprises a D16A Nme2Cas9 nickase, a linker comprising the amino acid sequence of SEQ ID NO: 130, and a cytidine deaminase comprising an amino acid sequence that is at least 85% identical to SEQ ID NO: 22. In some embodiments, the first genomic editor comprises a D16A Nme2Cas9 nickase, a linker comprising the amino acid sequence of SEQ ID NO: 131, and a cytidine deaminase comprising an amino acid sequence that is at least 85% identical to SEQ ID NO: 22. In some embodiments, the first genomic editor comprises a D16A Nme2Cas9 nickase, a linker comprising the amino acid sequence of SEQ ID NO: 132, and a cytidine deaminase comprising an amino acid sequence that is at least 85% identical SEQ ID NO: 22. In some embodiments, the first genomic editor comprises a D16A Nme2Cas9 nickase, a linker comprising the amino acid sequence of SEQ ID NO: 133, and a cytidine deaminase comprising an amino acid sequence that is at least 85% identical to SEQ ID NO: 22. In any of the foregoing embodiments, the D16A Nme2Cas9 nickase may comprise an amino acid sequence that is at least 85%, at least 90%, at least 95%, at least 98%, at least 99%, or 100% identical to SEQ ID NO: 149.

[0224] In some embodiments, the first genomic editor comprises a D10A SpyCas9 nickase, a linker comprising the amino acid sequence of SEQ ID NO: 129, and a cytidine deaminase comprising the amino acid sequence of SEQ ID NO: 22. In some embodiments, the first genomic editor comprises a D10A SpyCas9 nickase, a linker comprising the amino acid sequence of SEQ ID NO: 130, and a cytidine deaminase comprising the amino acid sequence of SEQ ID NO: 22. In some embodiments, the first genomic editor comprises a D10A SpyCas9 nickase, a linker comprising the amino acid sequence of SEQ ID NO: 131, and a cytidine deaminase comprising the amino acid sequence of SEQ ID NO: 22. In some embodiments, the first genomic editor comprises a D10A SpyCas9 nickase, a linker comprising the amino acid sequence of SEQ ID NO: 132, and a cytidine deaminase comprising the amino acid sequence of SEQ ID NO: 22. In some embodiments, the first genomic editor comprises a D10A SpyCas9 nickase, a linker comprising the amino acid sequence of SEQ ID NO: 133, and a cytidine deaminase comprising the amino acid sequence of SEQ ID NO: 22. In any of the foregoing embodiments, the D10A SpyCas9 comprises an amino acid sequence that is at least 85%, at least 90%, at least 95%, at least 98%, at least 99%, or 100% identical to any one of SEQ ID NOs: 41, 43, and 45.

[0225] In some embodiments, the first genomic editor comprises a D16A Nme2Cas9 nickase, a linker comprising the amino acid sequence of SEQ ID NO: 129, and a cytidine deaminase comprising the amino acid sequence of SEQ ID NO: 22. In some embodiments, the first genomic editor comprises a D16A Nme2Cas9 nickase, a linker comprising the amino acid sequence of SEQ ID NO: 130, and a cytidine deaminase comprising the amino acid sequence of SEQ ID NO: 22. In some embodiments, the first genomic editor comprises a D16A Nme2Cas9 nickase, a linker comprising the amino acid sequence of SEQ ID NO: 131, and a cytidine deaminase comprising the amino acid sequence of SEQ ID NO: 22. In some embodiments, the first genomic editor comprises a D16A Nme2Cas9 nickase, a linker comprising the amino acid sequence of SEQ ID NO: 132, and a cytidine deaminase comprising the amino acid sequence of SEQ ID NO: 22. In some embodiments, the first genomic editor comprises a D16A Nme2Cas9 nickase, a linker comprising the amino acid sequence of SEQ ID NO: 133, and a cytidine deaminase comprising the amino acid sequence of SEQ ID NO: 22. In any of the foregoing embodiments, the D16A Nme2Cas9 nickase comprises an amino acid sequence that is at least 85%, at least 90%, at least 95%, at least 98%, at least 99%, or 100% identical to SEQ ID NO: 149.

[0226] The first genomic editor may be organized in any number of ways to form a single chain. The NLS can be N- or C-terminal, or both N- and C-terminals, and the cytidine deaminase can be N- or C-terminal as compared the RNA-guided nickase. In some embodiments, the first genomic editor comprises, from N to C terminus, a cytidine deaminase, an optional linker, an RNA-guided nickase, and an optional NLS. In some embodiments, the first genomic editor comprises, from N to C terminus, an RNA-guided nickase, an optional linker, a cytidine deaminase, and an optional NLS. In some embodiments, the first genomic editor comprises, from N to C terminus, an optional NLS, an RNA-guided nickase, an optional linker, and a cytidine deaminase. In some embodiments, the first genomic editor comprises, from N to C terminus, an optional NLS, an RNA-guided nickase, an optional linker, and a cytidine deaminase, and an optional NLS.

[0227] In some embodiments, the first genomic editor comprises, from N to C terminus, an optional NLS, an enzyme of APOBEC family, an optional linker, an RNA-guided nickase, and an optional NLS. In some embodiments, the first genomic editor comprises, from N to C terminus, an optional NLS, an RNA-guided nickase, an optional linker, an enzyme of APOBEC family and an optional NLS. In some embodiments, the first genomic editor comprises, from N to C terminus, an optional NLS, an RNA-guided nickase, an optional linker, an enzyme of APOBEC family, and an optional NLS. In some embodiments, the first genomic editor comprises, from N to C terminus, an optional NLS, an RNA-guided nickase, an optional linker, an enzyme of APOBEC family, and an optional NLS.

[0228] In some embodiments, the first genomic editor comprises, from N to C terminus, an optional NLS, an enzyme of APOBEC3 subgroup, an optional linker, an RNA-guided nickase, and an optional NLS. In some embodiments, the first genomic editor comprises, from N to C terminus, an optional NLS, an RNA-guided nickase, an optional linker, an enzyme of APOBEC3 subgroup and an optional NLS. In some embodiments, the first genomic editor comprises, from N to C terminus, an optional NLS, an RNA-guided nickase, an optional linker, an enzyme of APOBEC3 subgroup, and an optional NLS. In some embodiments, the first genomic editor comprises, from N to C terminus, an optional NLS, an RNA-guided nickase, an optional linker, an enzyme of APOBEC3 subgroup, and an optional NLS.

[0229] In some embodiments, the first genomic editor comprises, from N to C terminus, an optional NLS, an enzyme of APOBEC family, an optional linker, a D10A SpyCas9 nickase or a D16A Nme2Cas9 nickase, and an optional NLS. In some embodiments, the first genomic editor comprises, from N to C terminus, an optional NLS, a DTOA SpyCas9 nickase or a D16A Nme2Cas9 nickase, an optional linker, an enzyme of APOBEC family and an optional NLS. In some embodiments, the first genomic editor comprises, from N to C terminus, an optional NLS, a DTOA SpyCas9 nickase or a D16A Nme2Cas9 nickase, an optional linker, an enzyme of APOBEC family, and an optional NLS. In some embodiments, the first genomic editor comprises, from N to C terminus, an optional NLS, a DTOA SpyCas9 nickase or a D16A Nme2Cas9 nickase, an optional linker, and an enzyme of APOBEC family, and an optional NLS.

[0230] In some embodiments, the first genomic editor comprises, from N to C terminus, an optional NLS, an enzyme of APOBEC3 subgroup, an optional linker, a D10A SpyCas9 nickase or a D16A Nme2Cas9 nickase, and an optional NLS. In some embodiments, the first genomic editor comprises, from N to C terminus, an optional NLS, a DTOA SpyCas9 nickase or a D16A Nme2Cas9 nickase, an optional linker, an enzyme of APOBEC3 subgroup and an optional NLS. In some embodiments, the first genomic editor comprises, from N to C terminus, an optional NLS, a DTOA SpyCas9 nickase or a D16A Nme2Cas9 nickase, an optional linker, an enzyme of APOBEC3 subgroup, and an optional NLS. In some embodiments, the first genomic editor comprises, from N to C terminus, an optional NLS, a D10A SpyCas9 nickase or a D16A Nme2Cas9 nickase, an optional linker, and an enzyme of APOBEC3 subgroup, and an optional NLS.

[0231] In some embodiments, the first genomic editor comprises, from N to C terminus, an optional NLS, an enzyme of APOBEC3 subgroup, an optional linker, a D16A Nme2Cas9 nickase.

[0232] In some embodiments, the first genomic editor comprises, from N to C terminus, (i) an optional NLS; (ii) a cytidine deaminase comprising an amino acid sequence that is at least 80% identical to SEQ ID NOs: 22; (iii) a linker comprising one or more sequences selected from SEQ ID NOs: 25-38, 39 and 72-133, (iv) a D10A SpyCas9 nickase or a D16A Nme2Cas9 nickase, and (v) an optional NLS.

[0233] In some embodiments, the first genomic editor comprises, from N to C terminus, (i) an optional NLS, (ii) a D10A SpyCas9 nickase or a D16A Nme2Cas9 nickase, (iii) a linker comprising one or more sequences selected from SEQ ID NOs: 25-38, 39 and 72-133, (iv) a cytidine deaminase comprising an amino acid sequence that is at least 80% identical to SEQ ID NOs: 22, and (v) an optional NLS.

[0234] In some embodiments, the first genomic editor comprises, from N to C terminus, (i) an optional NLS, (ii) a D10A SpyCas9 nickase or a D16A Nme2Cas9 nickase, (iii) a linker comprising one or more sequences selected from SEQ ID NOs: 25-38, 39 and 72-133, (iv) a cytidine deaminase comprising an amino acid sequence that is at least 80% identical to SEQ ID NOs: 22, and (v) an optional NLS.

[0235] In some embodiments, the first genomic editor comprises, from N to C terminus, (i) an optional NLS, (ii) a D10A SpyCas9 nickase or a D16A Nme2Cas9 nickase, (iii) a linker comprising one or more sequences selected from SEQ ID NOs: 25-38, 39 and 72-133, (iv) cytidine deaminase comprising an amino acid sequence that is at least 80% identical to SEQ ID NOs: 22, and (v) an optional NLS.

[0236] In some embodiments, the first genomic editor comprises, from N to C terminus, (i) an optional NLS, (ii) a cytidine deaminase comprising an amino acid sequence that is at least 80% identical to SEQ ID NOs: 22; (iii) a linker comprising one or more sequences selected from SEQ ID NOs: 25-38, 39 and 72-133, (iv) a D10A SpyCas9 nickase or a D16A Nme2Cas9 nickase, and (v) an optional NLS.

[0237] In some embodiments, the first genomic editor comprises, from N to C terminus, (i) an optional NLS, (ii) a D10A SpyCas9 nickase or a D16A Nme2Cas9 nickase, (iii) a linker comprising one or more sequences selected from SEQ ID NOs: 25-38, 39 and 72-133, (iv) a cytidine deaminase comprising an amino acid sequence that is at least 80% identical to SEQ ID NOs: 22, and (v) an optional NLS.

[0238] In some embodiments, the first genomic editor comprises, from N to C terminus, (i) an optional NLS, (ii) a D10A SpyCas9 nickase or a D16A Nme2Cas9 nickase, (iii) a linker comprising one or more sequences selected from SEQ ID NOs: 25-38, 39 and 72-133, (iv) a cytidine deaminase comprising an amino acid sequence that is at least 80% identical to SEQ ID NOs: 22, and (v) an optional NLS.

[0239] In some embodiments, the first genomic editor comprises, from N to C terminus, (i) an optional NLS, (ii) a D10A SpyCas9 nickase or a D16A Nme2Cas9 nickase, (iii) a linker comprising one or more sequences selected from SEQ ID NOs: 25-38, 39 and 72-133, and (iv) cytidine deaminase comprising an amino acid sequence that is at least 80% identical to SEQ ID NOs: 22, and (v) an optional NLS.

### 2. Compositions Comprising an APOBEC3A Deaminase and an RNA-Guided Nickase

[0240] In some embodiments, a first genome editing tool comprising a first genomic editor is provided. In some embodiments, the first genomic editor comprises a base editor. In some embodiments, the first genomic editor or the base editor comprises a human A3A and an RNA-guided nickase. In some embodiments, the first genomic editor or the base editor comprises a wild-type A3A and an RNA-guided nickase. In some embodiments, the first genomic editor or the base editor comprises an A3A variant and an RNA-guided nickase. In some embodiments, the first genomic editor or the base editor comprises an A3A and a Cas9 nickase. In some embodiments, the first genomic editor or the base editor comprises an A3A and a D10A SpyCas9 nickase. In some embodiments, the first genomic editor or the base editor comprises a human A3A and a D10A SpyCas9 nickase. In some embodiments, the first genomic editor or the base editor comprises an A3A variant and a D10A SpyCas9 nickase. In some embodiments, the first genomic editor or the base editor lacks a UGI. In some embodiments, the first genomic editor or the base editor comprises one or more UGIs. In some embodiments, the first genomic editor or the base editor comprises two UGIs. In some embodiments, the A3A and the RNA-guided nickase are linked via a linker. In some embodiments, the first genomic editor or the base editor further comprises one or more additional heterologous functional domains. In some embodiments, the first genomic editor or the base editor further comprises a nuclear localization sequence (NLS) (described herein) at the C-terminal of the polypeptide or the N-terminal of the polypeptide.

[0241] In some embodiments, the first genomic editor or the base editor comprises a human A3A and a D10A SpyCas9 nickase, wherein the human A3A and the D10A SpyCas9 nickase are fused via a linker. In some embodiments, the first genomic editor or the base editor comprises a human A3A and a D10A SpyCas9 nickase, and a nuclear localization sequence (NLS) at the C-terminus of the fused polypeptide. In some embodiments, the first genomic editor or the base editor comprises a human A3A and a D10A SpyCas9 nickase, and a NLS at the N-terminus of the fused polypeptide. In some embodiments, the first genomic editor or the base editor comprises a human A3A and a D10A SpyCas9 nickase, wherein the human A3A and the D10A SpyCas9 nickase are fused via a linker, and a NLS fused to the C-terminus of the D10A SpyCas9 nickase, optionally via a linker. In some embodiments, the first genomic editor or the base editor comprises a human A3A and a D10A SpyCas9 nickase, wherein the human A3A and the D10A SpyCas9 nickase are fused via a linker, and a NLS fused to the C-terminus of the D10A SpyCas9 nickase, optionally via a linker.

[0242] In some embodiments, the first genomic editor or the base editor comprises a human A3A and a D16A NmeCas9 nickase, wherein the human A3A and the D16A NmeCas9 nickase are fused via a linker. In some embodiments, the first genomic editor or the base editor comprises a human A3A and a D16A NmeCas9 nickase, and a nuclear localization sequence (NLS) at the C-terminus of the fused polypeptide. In some embodiments, the first genomic editor or the base editor comprises a human A3A and a D16A NmeCas9 nickase, and a NLS at the N-terminus of the fused polypeptide. In some embodiments, the first genomic editor or the base editor comprises a human A3A and a D16A NmeCas9 nickase, wherein the human A3A and the D16A NmeCas9 nickase are fused via a linker, and a NLS fused to the C-terminus of the D16A NmeCas9 nickase, optionally via a linker. In some embodiments, the first genomic editor or the base editor comprises a human A3A and a D16A NmeCas9 nickase, wherein the human A3A and the D16A NmeCas9 nickase are fused via a linker, and a NLS fused to the C-terminus of the D16A NmeCas9 nickase, optionally via a linker.

[0243] The first genomic editor or the base editor may be organized in any number of ways to form a single chain. The NLS can be N- or C-terminal, or both N- and C-terminals. and the A3A can be N- or C-terminal as compared the RNA-guided nickase. In some embodiments, the first genomic editor or the base editor comprises, from N to C terminus, an A3A, an optional linker, an RNA-guided nickase, and an optional NLS. In some first genomic editor or the base editor, the polypeptide comprises, from N to C terminus, an RNA-guided nickase, an optional linker, an A3A, and an optional NLS. In some first genomic editor or the base editor, the polypeptide comprises, from N to C terminus, an optional NLS, an RNA-guided nickase, an optional linker, and an A3A. In some embodiments, the first genomic editor or the base editor comprises, from N to C terminus, an optional NLS, an RNA-guided nickase, an optional linker, and an A3A, and an optional NLS.

[0244] In any of the foregoing embodiments, the first genomic editor or the base editor may comprise an amino acid sequence having at least 80% identity to SEQ ID NO: 3, 6, or 146. In some embodiments, any of the foregoing levels of identity is at least 85%, at least 90%, at least 95%, at least 98%, at least 99%, or 100%. In some embodiments, the first genomic editor or the base editor disclosed herein may comprise an amino acid sequence with at least 90% identity to SEQ ID NO: 3, 6, or 146. In some embodiments, the first genomic editor or the base editor disclosed herein may comprise an amino acid sequence with at least 95% identity to SEQ ID NO: 3, 6, or 146. In some embodiments, the first genomic editor or the base editor disclosed herein may comprise an amino acid sequence with at least 98% identity to SEQ ID NO: 3, 6, or 146. In some embodiments, the first genomic editor or the base editor disclosed herein may comprise an amino acid sequence with at least 99% identity to SEQ ID NO: 3, 6, or 146. In some embodiments, the first genomic editor or the base editor disclosed herein may comprise an amino acid sequence of SEQ ID NO: 3, 6, or 146.

[0245] In any of the foregoing embodiments, a nucleic acid or ORF encoding the first genomic editor or the base editor disclosed herein may comprise a nucleic acid sequence having at least 80% identity to SEQ ID NO: 2, 5, or 147. In some embodiments, any of the foregoing levels of identity is at least 85%, at least 90%, at least 95%, at least 98%, at least 99%, or 100%.

[0246] In any of the foregoing embodiments, a nucleic acid or ORF encoding the first genomic editor or the base editor disclosed herein may comprise a nucleic acid sequence having at least 80% identity to SEQ ID NO: 1 or 4. In some embodiments, any of the foregoing levels of identity is at least 85%, at least 90%, at least 95%, at least 98%, at least 99%, or 100%.

[0247] In any of the foregoing embodiments, the first genomic editor or the base editor may comprise an amino acid sequence having at least 80% identity to any one of SEQ ID NOs: 9, 12, 18, and 21. In some embodiments, any of the foregoing levels of identity is at least 85%, at least 90%, at least 95%, at least 98%, at least 99%, or 100%. In some embodiments, the first genomic editor or the base editor disclosed herein may comprise an amino acid sequence with at least 90% identity to any one of SEQ ID NOs: 9, 12, 18, and 21. In some embodiments, the first genomic editor or the base editor disclosed herein may comprise an amino acid sequence with at least 95% identity to any one of SEQ ID NOs: 9, 12, 18, and 21. In some embodiments, the first genomic editor or the base editor disclosed herein may comprise an amino acid sequence with at least 98% identity to any one of SEQ ID NOs: 9, 12, 18, and 21. In some embodiments, the first genomic editor or the base editor disclosed herein may comprise an amino acid sequence with at least 99% identity to any one of SEQ ID NOs: 9, 12, 18, and 21. In some embodiments, the first genomic editor or the base editor disclosed herein may comprise an amino acid sequence of any one of SEQ ID NOs: 9, 12, 18, and 21.

[0248] In any of the foregoing embodiments, a nucleic acid or ORF encoding the first genomic editor or the base editor disclosed herein may comprise a nucleic acid sequence having at least 80% identity to any one of SEQ ID NOs: 8, 11, 17, and 20. In some embodiments, any of the foregoing levels of identity is at least 85%, at least 90%, at least 95%, at least 98%, at least 99%, or 100%.

[0249] In any of the foregoing embodiments, a nucleic acid or ORF encoding the first genomic editor or the base editor disclosed herein may comprise a nucleic acid sequence having at least 80% identity to any one of SEQ ID NOs: 7, 10, 16, and 19. In some embodiments, any of the foregoing levels of identity is at least 85%, at least 90%, at least 95%, at least 98%, at least 99%, or 100%.

[0250] In any of the foregoing embodiments, the first genomic editor or the base editor may comprise an amino acid sequence having at least 80%, at least 90%, at least 95%, at least 98%, at least 99%, or 100% identity to SEQ ID NO: 136, 139, 142, or 145. In some embodiments, the first genomic editor or the base editor disclosed herein may comprise an amino acid sequence of SEQ ID NO: 136, 139, 142, or 145. In any of the foregoing embodiments, a nucleic acid or ORF encoding the first genomic editor or the base editor disclosed herein may comprise a nucleic acid sequence having at least 80%, at least 90%, at least 95%, at least 98%, at least 99%, or 100% identity to SEQ ID NOs: SEQ ID NO: 135, 138, 141, or 144. In some embodiments, a nucleic acid or ORF encoding the first genomic editor or the base editor disclosed herein comprises a nucleic acid sequence of SEQ ID NOs: SEQ ID NO: 135, 138, 141, or 144. In any of the foregoing embodiments, a nucleic acid or ORF encoding the first genomic editor or the base editor disclosed herein may comprise a nucleic acid sequence having at least 80%, at least 90%, at least 95%, at least 98%, at least 99%, or 100% identity to SEQ ID NO: 134, 137, 140, or 143. In any of the foregoing embodiments, a nucleic acid or ORF encoding the first genomic editor or the base editor disclosed herein may comprise a nucleic acid sequence of SEQ ID NO: 134, 137, 140, or 143.

[0251] In any of the foregoing embodiments, the A3A may comprise an amino acid sequence having at least 80% identity to SEQ ID NO: 22. In some embodiments, the level of identity is at least 85%, at least 87%, at least 90%, at least 95%, at least 98%, at least 99%, or 100%. In some embodiments, the A3A comprises an amino acid sequence of SEQ ID NO: 22.

[0252] In any of the foregoing embodiments, the RNA-guided nickase may comprise an amino acid sequence having at least 80%, 90%, 95%, 98%, or 99% identity to any one of SEQ ID NO: 41, 43, or 45. In some embodiments, the level of identity is at least 85%, at least 87%, at least 90%, at least 95%, at least 98%, at least 99%, or 100%. In some embodiments, the RNA-guided nickase comprises the amino acid sequence of SEQ ID NO: 41. In some embodiments, the RNA-guided nickase comprises the amino acid sequence of SEQ ID NO: 43. In some embodiments, the RNA-guided nickase comprises the amino acid sequence of SEQ ID NO: 45.

[0253] In any of the foregoing embodiments, the A3A may comprise an amino acid sequence having at least 80% identity to SEQ ID NO: 22 and the RNA-guided nickase may comprise an amino acid sequence having at least 80%, 90%, 95%, 98%, or 99% identity to any one of SEQ ID NO: 41, 43, or 45. In some embodiments, the A3A comprises an amino acid sequence of SEQ ID NO: 22 and the RNA-guided nickase comprises an amino acid sequence of SEQ ID NO: 41.

[0254] In any of the foregoing embodiments, the a nucleic acid of ORF encoding the first genomic editor or the base editor comprises a nucleotide sequence that is at least 80%, 85%, 90%, 95%, 98%, or 100% identical to SEQ ID NO: 1. In any of the foregoing embodiments, a nucleic acid of ORF encoding the first genomic editor or the base editor comprises a nucleotide sequence that is at least 80%, 85%, 90%, 95%, 98%, or 100% identical to SEQ ID NO: 147. In any of the foregoing embodiments, a nucleic acid of ORF encoding the first genomic editor or the base editor comprises a nucleotide sequence that is at least 80%, 85%, 90%, 95%, 98%, or 100% identical to SEQ ID NO: 310.

### III. SECOND GENOME EDITING TOOL

[0255] In some embodiments, the second genome editing tool comprises a second genomic editor and at least one gRNA that targets at least one genomic locus and that is cognate to the second genomic editor, wherein the first genomic editor is orthogonal to the second genomic editor. In some embodiments, the second genome editing tool comprises a second genomic editor comprising an RNA-guided cleavase, and at least one gRNA that targets at least one genomic locus and that is cognate to the RNA-guided cleavase, wherein the base editor is orthogonal to the RNA-guided cleavase.

[0256] In some embodiments, the second genomic editor is delivered to the cell as at least one polypeptide or at least one mRNA. In some embodiments, the second genomic editor comprises at least one polypeptide or at least one mRNA. In some embodiments, the second genomic editor comprises a cleavase, a nickase, a catalytically inactive nuclease, a base editor, optionally a C to T base editor or an A to G base editor, or a fusion protein comprising a DNA polymerase and a nickase.

[0257] In some embodiments, one of the first genomic editor and the second genomic editor comprises a base editor, optionally a C to T base editor or an A to G base editor, and the other of the first genomic editor and the second genomic editor comprises a cleavase. In some embodiments, one of the first genomic editor and the second genomic editor comprises a C to T base editor, and the other of the first genomic editor and the second genomic editor comprises an A to G base editor. In some embodiments, one of the first genomic editor and second genomic editor comprises an N. meningitidis (Nine) RNA-guided nickase or cleavase, and the other of the first genomic editor and the second genomic editor comprises an S. pyogenes (Spy) RNA-guided nickase or cleavase.

[0258] In some embodiments, the second genomic editor or the RNA-guided cleavase is a Cas nuclease. In some embodiments, the Cas nuclease is a Cas9. In some embodiments, the Cas9 is Streptococcus pyogenes Cas9 (SpyCas9), S. aureus Cas9 (SauCas9), C. diphtheriae Cas9 (CdiCas9), Streptococcus thermophilus Cas9 (St1Cas9), A. cellulolyticus Cas9 (AceCas9), C. jejuni Cas9 (CjeCas9). R. palustris Cas9 (RpaCas9), R. rubrum Cas9 (RruCas9), A. naeslundii Cas9 (AnaCas9), Francisella novicida Cas9 (FnoCas9), or N. meningitidis (NmeCas9). In some embodiments, the Cas9 is an Nme1Cas9, an Nme2Cas9, an Nme3Cas9, or SpyCas9. In some embodiments, the Cas nuclease is a Class 2 Cas nuclease. In some embodiments, the Cas nuclease is a Cas12. In some embodiments, the Cas12 is Lachnospiraceae bacterium Cas12a (LbCas12a) or the Cas12 is Acidaminococcus sp. Cas12a (AsCas12a). In some embodiments, the Cas nuclease is an Eubacterium siraeum Cas13d (EsCas13d).

[0259] In some embodiments, the second genomic editor or the RNA-guided cleavase is a Cas9 cleavase. In some embodiments, the second genomic editor or the RNA-guided cleavase is Streptococcus pyogenes Cas9 (SpyCas9) cleavase. In some embodiments, the SpyCas9 cleavase comprises an amino acid sequence that is at least 90% identical to SEQ ID NO: 156. In some embodiments, the SpyCas9 cleavase comprises the amino acid sequence of SEQ ID NO: 156.

[0260] In some embodiments, the second genomic editor or the RNA-guided cleavase is a Cas9 cleavase. In some embodiments, the second genomic editor or the RNA-guided cleavase is N. meningitidis Cas9 (NmeCas9) cleavase. In some embodiments, the NmeCas9 cleavase comprises an amino acid sequence that is at least 90%, 91%, 92%, 93%, 94%, 95%, 96%, 97%, 98%, 99%, or 100% identical to any one of SEQ ID NOs: 157, 158-167, 191, 198, 205, 212, and 219. In some embodiments, the NmeCas9 cleavase comprises the amino acid sequence of any one of SEQ ID NOs: 157, 158-167, 191, 198, 205, 212, and 219.

[0261] In some embodiments, the second genome editing tool, the nucleic acid encoding the RNA-guided cleavase, the second nucleic acid comprising the second ORF, or the second ORF comprises a polynucleotide sequence that is at least 90%, 91%, 92%, 93%, 94%, 95%, 96%, 97%, 98%, 99%, or 100% identical to any one of SEQ ID NOs: 168, 169-178, 180, 181-190, 192-197, 199-204, 206-211, 213-218, and 220-225. In some embodiments, the second genome editing tool, the nucleic acid encoding the RNA-guided cleavase, the second nucleic acid comprising the second ORF, or the second ORF comprises the polynucleotide sequence of any one of SEQ ID NOs: 168, 169-178, 180, 181-190, 192-197, 199-204, 206-211, 213-218, and 220-225.

[0262] In some embodiments, the second genome editing tool comprises an RNA-guided cleavase. In some embodiments, the RNA-guided cleavase, when used with the at least one gRNA cognate to the cleavase, provides for simultaneous knock-out of the genomic locus targeted by the at least one gRNA and knock-in of an exogeneous gene.

[0263] In some embodiments, the second genome editing tool comprises a fusion protein comprising a DNA polymerase and a nickase. In some embodiments, the fusion protein comprising a DNA polymerase and a nickase, when used with the at least one gRNA cognate to the nickase, provides for targeted knock-in of an exogeneous nucleic acid.

[0264] In some embodiments, the second genome editing tool may be combined with any first genome editing tool disclosed herein. In some embodiments, the second nucleic acid comprising any second ORF may be combined with any first nucleic acid comprising any first ORF disclosed herein. Use of a Cas9 nickase and a Cas9 cleavase that are orthologous to each other in the first genome editing tool and the second genome editing tool may prevent cross-utilization.

[0265] In some embodiments, the first genome editing tool comprises a first genomic editor or a base editor comprising a deaminase (e.g., a cytidine deaminase) of the APOBEC family and a D16A NmeCas9 nickase, and at least one gRNA that targets at least one genomic locus and that is cognate to the nickase. In some embodiments, the first genomic editor or the base editor comprises one or more UGIs. In some embodiments, the second genome editing tool comprises an S. pyogenes Cas9 (SpyCas9) cleavase, and at least one gRNA that targets at least one genomic locus and that is cognate to the SpyCas9 cleavase.

[0266] In some embodiments, the first genome editing tool comprises a first genomic editor or a base editor comprising a deaminase (e.g., a cytidine deaminase) of the APOBEC family and a D16A NmeCas9 nickase, and at least one gRNA that targets at least one genomic locus and that is cognate to the nickase. In some embodiments, the first genomic editor or the base editor does not comprise any UGIs. In some embodiments, the first genome editing tool further comprises at least one UGI in a polypeptide different from the first genomic editor or the base editor. In some embodiments, the second genome editing tool comprises an S. pyogenes Cas9 (SpyCas9) cleavase, and at least one gRNA that targets at least one genomic locus and that is cognate to the SpyCas9cleavase.

[0267] In some embodiments, the first genome editing tool comprises a first genomic editor or a base editor comprising a deaminase (e.g., a cytidine deaminase) of the APOBEC family and a D10A SpyCas9 nickase, and at least one gRNA that targets at least one genomic locus and that is cognate to the nickase. In some embodiments, the first genomic editor or the base editor comprises one or more UGIs. In some embodiments, the second genome editing tool comprises an NmeCas9 cleavase, and at least one gRNA that targets at least one genomic locus and that is cognate to the NmeCas9 cleavase.

[0268] In some embodiments, the first genome editing tool comprises a first genomic editor or a base editor comprising a deaminase (e.g., a cytidine deaminase) of the APOBEC family and a D10A SpyCas9 nickase, and at least one gRNA that targets at least one genomic locus and that is cognate to the nickase. In some embodiments, the first genomic editor or the base editor does not comprise any UGIs. In some embodiments, the first genome editing tool further comprises at least one UGI in a polypeptide different from the first genomic editor or the base editor. In some embodiments, the second genome editing tool comprises an NmeCas9 cleavase, and at least one gRNA that targets at least one genomic locus and that is cognate to the NmeCas9 cleavase.

### IV. ADDITIONAL FEATURES

[0269] The following section provides additional features of the first genomic editor, the base editor, the second genomic editor, and the nucleic acid encoding the same. In any of the embodiments set forth herein, the nucleic acid may be an expression construct comprising a promoter operably linked to an ORF encoding the first genomic editor, the base editor, or the second genomic editor disclosed herein.

### A. Codon-optimization

[0270] In some embodiments, the nucleic acid encoding the first genomic editor, the base editor, or the second genomic editor comprises an ORF comprising a codon optimized nucleic acid sequence. In some embodiment, the codon optimized nucleic acid sequence comprises minimal adenine codons and/or minimal uridine codons.

[0271] A given ORF can be reduced in uridine content or uridine dinucleotide content, for example, by using minimal uridine codons in a sufficient fraction of the ORF. For example, an amino acid sequence for the first genomic editor, the base editor, or the second genomic editor described herein can be back-translated into an ORF sequence by converting amino acids to codons, wherein some or all of the ORF uses the exemplary minimal uridine codons shown below. In some embodiments, at least about 50%, 55%, 60%, 65%, 70%, 75%, 80%, 85%, 90%, 95%, 98%, 99%, or 100% of the codons in the ORF are codons listed in Table 1.

TABLE 1
Exemplary minimal uridine codons

| | Amino Acid | Minimal uridine codon |
|---|---|---|
| A | Alanine | GCA or GCC or GCG |
| G | Glycine | GGA or GGC or GGG |
| V | Valine | GUC or GUA or GUG |
| D | Aspartic acid | GAC |
| E | Glutamic acid | GAA or GAG |
| I | Isoleucine | AUC or AUA |
| T | Threonine | ACA or ACC or ACG |
| N | Asparagine | AAC |
| K | Lysine | AAG or AAA |
| S | Serine | AGC |
| R | Arginine | AGA or AGG |
| L | Leucine | CUG or CUA or CUC |
| P | Proline | CCG or CCA or CCC |
| H | Histidine | CAC |
| Q | Glutamine | CAG or CAA |
| F | Phenylalanine | UUC |
| Y | Tyrosine | UAC |
| C | Cysteine | UGC |
| W | Tryptophan | UGG |
| M | Methionine | AUG |

[0272] In some embodiments, the ORF may consist of a set of codons of which at least about 75%, 80%, 85%, 90%, 95%, 98%, 99%, or 100% of the codons are codons listed in Table 1.

[0273] A given ORF can be reduced in adenine content or adenine dinucleotide content, for example, by using minimal adenine codons in a sufficient fraction of the ORF. For example, an amino acid sequence for the first genomic editor, the base editor, or the second genomic editor described herein can be back-translated into an ORF sequence by converting amino acids to codons, wherein some or all of the ORF uses the exemplary minimal adenine codons shown below. In some embodiments, at least about 50%, 55%, 60%, 65%, 70%, 75%, 80%, 85%, 90%, 95%, 98%, 99%, or 100% of the codons in the ORF are codons listed in Table 2.

TABLE 2
Exemplary minimal adenine codons

| | Amino Acid | Minimal adenine codon |
|---|---|---|
| A | Alanine | GCU or GCC or GCG |
| G | Glycine | GGU or GGC or GGG |
| V | Valine | GUC or GUU or GUG |
| D | Aspartic acid | GAC or GAU |
| E | Glutamic acid | GAG |
| I | Isoleucine | AUC or AUU |
| T | Threonine | ACU or ACC or ACG |
| N | Asparagine | AAC or AAU |
| K | Lysine | AAG |
| S | Serine | UCU or UCC or UCG |
| R | Arginine | CGU or CGC or CGG |
| L | Leucine | CUG or CUC or CUU |
| P | Proline | CCG or CCU or CCC |
| H | Histidine | CAC or CAU |
| Q | Glutamine | CAG |
| F | Phenylalanine | UUC or UUU |
| Y | Tyrosine | UAC or UAU |
| C | Cysteine | UGC or UGU |
| W | Tryptophan | UGG |
| M | Methionine | AUG |

[0274] In some embodiments, the ORF may consist of a set of codons of which at least about 75%, 80%, 85%, 90%, 95%, 98%, 99%, or 100% of the codons are codons listed in Table 2.

[0275] To the extent feasible, any of the features described above with respect to low adenine content can be combined with any of the features described above with respect to low uridine content. So too for uridine and adenine dinucleotides. Similarly, the content of uridine nucleotides and adenine dinucleotides in the ORF may be as set forth above. Similarly, the content of uridine dinucleotides and adenine nucleotides in the ORF may be as set forth above.

[0276] A given ORF can be reduced in uridine and adenine nucleotide or dinucleotide content, for example, by using minimal uridine and adenine codons in a sufficient fraction of the ORF. For example, an amino acid sequence for the polypeptide, the second genomic editor, or the RNA-guided cleavase described herein can be back-translated into an ORF sequence by converting amino acids to codons, wherein some or all of the ORF uses the exemplary minimal uridine and adenine codons shown below. In some embodiments, at least about 50%, 55%, 60%, 65%, 70%, 75%, 80%, 85%, 90%, 95%, 98%, 99%, or 100% of the codons in the ORF are codons listed in Table 3.

TABLE 3
Exemplary minimal uridine and adenine codons

| | | Minimal uridine and adenine |
|---|---|---|
| | Amino Acid | codon |
| A | Alanine | GCC or GCG |
| G | Glycine | GGC or GGG |
| V | Valine | GUC or GUG |
| D | Aspartic acid | GAC |
| E | Glutamic acid | GAG |
| I | Isoleucine | AUC |
| T | Threonine | ACC or ACG |
| N | Asparagine | AAC |
| K | Lysine | AAG |
| S | Serine | AGC or UCC or UCG |
| R | Arginine | CGC or CGG |
| L | Leucine | CUG or CUC |
| P | Proline | CCG or CCC |
| H | Histidine | CAC |
| Q | Glutamine | CAG |
| F | Phenylalanine | UUC |
| Y | Tyrosine | UAC |
| C | Cysteine | UGC |
| W | Tryptophan | UGG |
| M | Methionine | AUG |

[0277] In some embodiments, the ORF may consist of a set of codons of which at least about 75%, 80%, 85%, 90%, 95%, 98%, 99%, or 100% of the codons are codons listed in Table 3. As can be seen in Table 3, each of the three listed serine codons contains either one A or one U. In some embodiments, uridine minimization is prioritized by using AGC codons for serine. In some embodiments, adenine minimization is prioritized by using UCC or UCG codons for serine.

[0278] In some embodiments, the ORF may have codons that increase translation in a mammal, such as a human. In further embodiments, ORF is an mRNA and comprises codons that increase translation in an organ, such as the liver, of the mammal, e.g., a human. In further embodiments, the ORF may have codons that increase translation in a cell type, such as a hepatocyte, of the mammal, e.g., a human. An increase in translation in a mammal, cell type, organ of a mammal, human, organ of a human, etc., can be determined relative to the extent of translation wild-type sequence of the ORF, or relative to an ORF having a codon distribution matching the codon distribution of the organism from which the ORF was derived or the organism that contains the most similar ORF at the amino acid level. Alternatively, in some embodiments, an increase in translation for a Cas9 sequence in a mammal, cell type, organ of a mammal, human, organ of a human, etc., is determined relative to translation of an ORF with the sequence of SEQ ID NO: 2 or 5 with all else equal, including any applicable point mutations, heterologous domains, and the like. In some embodiments, at least about 75%, 80%, 85%, 90%, 95%, 96%, 97%, 98%, 99%, or 100% of the codons in an ORF are codons corresponding to highly expressed tRNAs (e.g., the highest-expressed tRNA for each amino acid) in a mammal, such as a human. In some embodiments, at least 75%, 80%, 85%, 90%, 95%, 96%, 97%, 98%, 99%, or 100% of the codons in an ORF are codons corresponding to highly expressed tRNAs (e.g., the highest-expressed tRNA for each amino acid) in a mammalian organ, such as a human organ.

[0279] Alternatively, codons corresponding to highly expressed tRNAs in an organism (e.g., human) in general may be used.

[0280] Any of the foregoing approaches to codon selection can be combined with the minimal uridine or adenine codons shown above, e.g., by starting with the codons of Table 1, Table 2, or Table 3, and then where more than one option is available, using the codon that corresponds to a more highly-expressed tRNA, either in the organism (e.g., human) in general, or in an organ or cell type of interest (e.g., human liver or human hepatocytes).

[0281] In some embodiments, at least 75%, 80%, 85%, 90%, 95%, 96%, 97%, 98%, 99%, or 100% of the codons in an ORF are codons from a codon set shown in Table 4 (e.g., the low U 1, low A, or low A/U codon set). The codons in the low U 1, low G, low A, and low A/U sets use codons that minimize the indicated nucleotides while also using codons corresponding to highly expressed tRNAs where more than one option is available. In some embodiments, at least 75%, 80%, 85%, 90%, 95%, 96%, 97%, 98%, 99%, or 100% of the codons in an ORF are codons from the low U 1 codon set shown in Table 4. In some embodiments, at least 75%, 80%, 85%, 90%, 95%, 96%, 97%, 98%, 99%, or 100% of the codons in an ORF are codons from the low A codon set shown in Table 4. In some embodiments, at least 75%, 80%, 85%, 90%, 95%, 96%, 97%, 98%, 99%, or 100% of the codons in an ORF are codons from the low A/U codon set shown in Table 4.

TABLE 4
Exemplary Codon Sets.

| Amino Acid | Low U 1 | Low U 2 | Low A | Low A/U |
|---|---|---|---|---|
| Gly | GGC | GGG | GGC | GGC |
| Glu | GAG | GAA | GAG | GAG |
| Asp | GAC | GAC | GAC | GAC |
| Val | GTG | GTA | GTG | GTG |
| Ala | GCC | GCG | GCC | GCC |
| Arg | AGA | CGA | CGG | CGG |
| Ser | AGC | AGC | TCC | AGC |
| Lys | AAG | AAA | AAG | AAG |
| Asn | AAC | AAC | AAC | AAC |
| Met | ATG | ATG | ATG | ATG |
| Ile | ATC | ATA | ATC | ATC |
| Thr | ACC | ACG | ACC | ACC |
| Trp | TGG | TGG | TGG | TGG |
| Cys | TGC | TGC | TGC | TGC |
| Tyr | TAC | TAC | TAC | TAC |
| Leu | CTG | CTA | CTG | CTG |
| Phe | TTC | TTC | TTC | TTC |
| Gln | CAG | CAA | CAG | CAG |
| His | CAC | CAC | CAC | CAC |

### B. Heterologous Functional Domains; Nuclear Localization Signals (NLS)

[0282] In some embodiments, the first genomic editor, the base editor, or the second genomic editor disclosed herein further comprises one or more additional heterologous functional domains (e.g., is or comprises a ternary or higher-order fusion polypeptide).

[0283] In some embodiments, the heterologous functional domain may facilitate transport of the first genomic editor, the base editor, or the second genomic editor into the nucleus of a cell. For example, the heterologous functional domain may be a nuclear localization signal (NLS). In some embodiments, the first genomic editor, the base editor, or the second genomic editor may be fused with 1-10 NLS(s). In some embodiments, the first genomic editor, the base editor, or the second genomic editor may be fused with 1-5 NLS(s). In some embodiments, the first genomic editor, the base editor, or the second genomic editor may be fused with one NLS. Where one NLS is used, the NLS may be fused at the N-terminus or the C-terminus of first genomic editor, the base editor, or the second genomic editor sequence. In some embodiments, the first genomic editor, the base editor, or the second genomic editor may be fused C-terminally to at least one NLS. An NLS may also be inserted within the polypeptide, the second genomic editor, or the RNA-guided cleavase sequence. In other embodiments, the first genomic editor, the base editor, or the second genomic editor may be fused with more than one NLS. In some embodiments, the first genomic editor, the base editor, or the second genomic editor may be fused with 2, 3, 4, or 5 NLSs. In some embodiments, the first genomic editor, the base editor, or the second genomic editor may be fused with two NLSs. In certain circumstances, the two NLSs may be the same (e.g., two SV40 NLSs) or different. In some embodiments, the first genomic editor, the base editor, or the second genomic editor is fused to two SV40 NLS sequences at the carboxy terminus. In some embodiments, the first genomic editor, the base editor, or the second genomic editor may be fused with two NLSs, one at the N-terminus and one at the C-terminus. In some embodiments, the first genomic editor, the base editor, or the second genomic editor may be fused with 3 NLSs. In some embodiments, the first genomic editor, the base editor, or the second genomic editor may be fused with no NLS. In some embodiments, the NLS may be a monopartite sequence, such as, e.g., the SV40 NLS, PKKKRKV (SEQ ID NO: 40) or PKKKRRV (SEQ ID NO: 70). In some embodiments, the NLS may be a bipartite sequence, such as the NLS of nucleoplasmin, KRPAATKKAGQAKKKK (SEQ ID NO: 71). In a specific embodiment, a single PKKKRKV (SEQ ID NO: 40) NLS may be fused at the C-terminus of the first genomic editor, the base editor, or the second genomic editor. One or more linkers are optionally included at the fusion site (e.g., between the first genomic editor, the base editor, or the second genomic editor and NLS). In some embodiments, one or more NLS(s) according to any of the foregoing embodiments are present in the first genomic editor, the base editor, or the second genomic editor in combination with one or more additional heterologous functional domains, such as any of the heterologous functional domains described below.

[0284] In some embodiments, the cytidine deaminase (e.g., A3A) is located N-terminal to the RNA-guided nickase in the first genomic editor or the base editor. In some embodiments, the RNA-guided nickase comprises a nuclear localization signal (NLS). In some embodiments, the NLS is fused to the C-terminus of the RNA-guided nickase. In some embodiments, the NLS is fused to the C-terminus of the RNA-guided nickase via a linker. In some embodiments, the NLS is fused to the N-terminus of the RNA-guided nickase. In some embodiments, the NLS is fused to the N-terminus of the RNA-guided nickase via a linker (e.g., SEQ ID NO: 39). In some embodiments, the NLS comprises a sequence having at least 80%, 85%, 90%, or 95% identity to any one of SEQ ID NOs: 40 and 59-71. In some embodiments, the NLS comprises the sequence of any one of SEQ ID NOs: 40 and 59-71. In some embodiments, the NLS is encoded by a sequence having at least 80%, 85%, 90%, 95%, 98% or 100% identity to the sequence of any one of SEQ ID NOs: 40 and 59-71.

[0285] In some embodiments, the heterologous functional domain may be capable of modifying the intracellular half-life of the A3A or the RNA-guided nickase in the first genomic editor or the base editor. In some embodiments, the half-life of the A3A or the RNA-guided nickase in the polypeptide may be increased. In some embodiments, the half-life of the A3A or the RNA-guided nickase in the first genomic editor or the base editor may be reduced. In some embodiments, the heterologous functional domain may be capable of increasing the stability of the A3A or the RNA-guided nickase in the first genomic editor or the base editor. In some embodiments, the heterologous functional domain may be capable of reducing the stability of the A3A or the RNA-guided nickase in the first genomic editor or the base editor. In some embodiments, the heterologous functional domain may act as a signal peptide for protein degradation. In some embodiments, the protein degradation may be mediated by proteolytic enzymes, such as, for example, proteasomes, lysosomal proteases, or calpain proteases. In some embodiments, the heterologous functional domain may comprise a PEST sequence. In some embodiments, the polypeptide may be modified by addition of ubiquitin or a polyubiquitin chain. In some embodiments, the ubiquitin may be a ubiquitin-like protein (UBL). Non-limiting examples of ubiquitin-like proteins include small ubiquitin-like modifier (SUMO), ubiquitin cross-reactive protein (UCRP, also known as interferon-stimulated gene-15 (ISG15)), ubiquitin-related modifier-1 (URM1), neuronal-precursor-cell-expressed developmentally downregulated protein-8 (NEDD8, also called Rubl in S. cerevisiae), human leukocyte antigen F-associated (FAT10), autophagy-8 (ATG8) and −12 (ATG12), Fau ubiquitin-like protein (FUB1), membrane-anchored UBL (MUB), ubiquitin fold-modifier-1 (UFM1), and ubiquitin-like protein-5 (UBL5).

[0286] In some embodiments, the heterologous functional domain may be a marker domain. Non-limiting examples of marker domains include fluorescent proteins, purification tags, epitope tags, and reporter gene sequences. In some embodiments, the marker domain may be a fluorescent protein. Any known fluorescent proteins may be used as the marker domain such as GFP, YFP, EBFP, ECFP, DsRed or any other suitable fluorescent protein. In some embodiments, the marker domain may be a purification tag or an epitope tag. Non-limiting exemplary tags include glutathione-S-transferase (GST), chitin binding protein (CBP), maltose binding protein (MBP), thioredoxin (TRX), poly(NANP), tandem affinity purification (TAP) tag, myc, AcV5, AU1, AU5, E, ECS, E2, FLAG, HA, nus, Softag 1, Softag 3, Strep, SBP, Glu-Glu, HSV, KT3, S, S1, T7, V5, VSV-G, 6xHis (SEQ ID NO: 401), 8xHis (SEQ ID NO: 402), biotin carboxyl carrier protein (BCCP), poly-His, and calmodulin. In some embodiments, the marker domain may be a reporter gene. Non-limiting exemplary reporter genes include glutathione-S-transferase (GST), horseradish peroxidase (HRP), chloramphenicol acetyltransferase (CAT), beta-galactosidase, beta-glucuronidase, luciferase, or fluorescent proteins.

[0287] In additional embodiments, the heterologous functional domain may target the first genomic editor, the base editor, or the second genomic editor to a specific organelle, cell type, tissue, or organ. In some embodiments, the heterologous functional domain may target the first genomic editor, the base editor, or the second genomic editor to mitochondria.

### C. UTRs; Kozak Sequences

[0288] In some embodiments, the nucleic acid (e.g., mRNA) disclosed herein comprises a 5′ UTR, 3′ UTR, or 5′ and 3′ UTRs from Hydroxysteroid 17-Beta Dehydrogenase 4 (HSD17B4 or HSD) or globin such as human alpha globin (HBA), human beta globin (HBB), Xenopus laevis beta globin (XBG), bovine growth hormone, cytomegalovirus (CMV), mouse Hba-al, heat shock protein 90 (Hsp90), glyceraldehyde 3-phosphate dehydrogenase (GAPDH), beta-actin, alpha-tubulin, tumor protein (p53), or epidermal growth factor receptor (EGFR).

[0289] In some embodiments, the nucleic acid described herein does not comprise a 5′ UTR, e.g., there are no additional nucleotides between the 5′ cap and the start codon. In some embodiments, the nucleic acid comprises a Kozak sequence (described below) between the 5′ cap and the start codon, but does not have any additional 5′ UTR. In some embodiments, the nucleic acid does not comprise a 3′ UTR, e.g., there are no additional nucleotides between the stop codon and the poly-A tail.

[0290] In some embodiments, the nucleic acid herein comprises a Kozak sequence. The Kozak sequence can affect translation initiation and the overall yield of a polypeptide translated from an mRNA. A Kozak sequence includes a methionine codon that can function as the start codon. A minimal Kozak sequence is NNNRUGN wherein at least one of the following is true: the first N is A or G and the second N is G. In the context of a nucleotide sequence, R means a purine (A or G). In some embodiments, the Kozak sequence is RNNRUGN, NNNRUGG, RNNRUGG, RNNAUGN, NNNAUGG, RNNAUGG, or GCCACCAUG.

### D. Poly-A Tail

[0291] In some embodiments, the nucleic acid disclosed herein further comprises a poly-adenylated (poly-A) tail. The poly-A tails may comprise at least 8 consecutive adenine nucleotides, but also comprise one or more non-adenine nucleotide. As used herein, “non-adenine nucleotides” refer to any natural or non-natural nucleotides that do not comprise adenine. Guanine, thymine, and cytosine nucleotides are exemplary non-adenine nucleotides. Thus, the poly-A tails on the nucleic acid described herein may comprise consecutive adenine nucleotides located 3′ to nucleotides encoding a polypeptide of interest. In some instances, the poly-A tails on the nucleic acid comprise non-consecutive adenine nucleotides located 3′ to nucleotides encoding the polypeptide, wherein non-adenine nucleotides interrupt the adenine nucleotides at regular or irregularly spaced intervals.

[0292] In some embodiments, the poly-A tail is encoded in a plasmid used for in vitro transcription of an mRNA and becomes part of the transcript. The poly-A sequence encoded in the plasmid, i.e., the number of consecutive adenine nucleotides in the poly-A sequence, may not be exact, e.g., a 100 poly-A sequence (SEQ ID NO: 403) in the plasmid may not result in a precisely 100 poly-A sequence (SEQ ID NO: 403) in the transcribed mRNA. In some embodiments, the poly-A tail is not encoded in the plasmid, and is added by PCR tailing or enzymatic tailing, e.g., using E. coli poly(A) polymerase.

[0293] In some embodiments, the one or more non-adenine nucleotides are positioned to interrupt the consecutive adenine nucleotides so that a poly(A) binding protein can bind to a stretch of consecutive adenine nucleotides. In some embodiments, one or more non-adenine nucleotide(s) is located after at least 8, 9, 10, 11, or 12 consecutive adenine nucleotides (SEQ ID NO: 404). In some embodiments, the one or more non-adenine nucleotide is located after 8-50 consecutive adenine nucleotides (SEQ ID NO: 405). In some embodiments, the one or more non-adenine nucleotide is located after 8-100 consecutive adenine nucleotides (SEQ ID NO: 406).

[0294] In some embodiments, the poly-A tail comprises or contains one non-adenine nucleotide or one consecutive stretch of 2-10 non-adenine nucleotides.

[0295] In some embodiments, the non-adenine nucleotide is guanine, cytosine, or thymine. In some instances, where more than one non-adenine nucleotide is present, the non-adenine nucleotide may be selected from: a) guanine and thymine nucleotides; b) guanine and cytosine nucleotides; c) thymine and cytosine nucleotides; or d) guanine, thymine and cytosine nucleotides.

### E. Modified Nucleotides

[0296] In some embodiments, the nucleic acid disclosed herein comprises a modified uridine at some or all uridine positions. In some embodiments, the modified uridine is a uridine modified at the 5 position, e.g., with a halogen or C1-C3 alkoxy. In some embodiments, the modified uridine is a pseudouridine modified at the 1 position, e.g., with a C1-C3 alkyl. The modified uridine can be, for example, pseudouridine, N1-methyl-pseudouridine, 5-methoxyuridine, 5-iodouridine, or a combination thereof.

[0297] In some embodiments, at least 10%, 15%, 20%, 25%, 30%, 35%, 40%, 45%, 50%, 55%, 60%, 65%, 70%, 75%, 80%, 85%, 90%, 95%, 98%, 99%, or 100% of the uridine positions in the nucleic acid disclosed herein are modified uridines. In some embodiments, 10%-25%, 15-25%, 25-35%, 35-45%, 45-55%, 55-65%, 65-75%, 75-85%, 85-95%, or 90-100% of the uridine positions in an mRNA disclosed herein are modified uridines, e.g., 5-methoxyuridine, 5-iodouridine, N1-methyl pseudouridine, pseudouridine, or a combination thereof.

[0298] In some embodiments, at least 10% of the uridine is substituted with a modified uridine. In some embodiments, 15% to 45% of the uridine is substituted with the modified uridine. In some embodiments, at least 20%, at least 30%, at least 40%, at least 50%, at least 60%, at least 70%, at least 80%, at least 90%, or 100% of the uridine is substituted with the modified uridine.

### F. 5′ Cap

[0299] In some embodiments, the nucleic acid disclosed herein comprises a 5′ cap, such as a Cap0, Cap1, or Cap2. A 5′ cap is generally a 7-methylguanine ribonucleotide (which may be further modified, as discussed below e.g., with respect to ARCA) linked through a 5′-triphosphate to the 5′ position of the first nucleotide of the 5′-to-3′ chain of the nucleic acid, i.e., the first cap-proximal nucleotide. In Cap0, the riboses of the first and second cap-proximal nucleotides of the mRNA both comprise a 2′-hydroxyl. In Cap1, the riboses of the first and second transcribed nucleotides of the nucleic acid comprise a 2′-methoxy and a 2′-hydroxyl, respectively. In Cap2, the riboses of the first and second cap-proximal nucleotides of the nucleic acid both comprise a 2′-methoxy. See, e.g., Katibah et al. (2014) Proc Natl Acad Sci USA 111(33):12025-30; Abbas et al. (2017) Proc Natl Acad Sci USA 114(11):E2106-E2115. Most endogenous higher eukaryotic nucleic acids, including mammalian nucleic acids such as human nucleic acids, comprise Cap1 or Cap2. Cap0 and other cap structures differing from Cap1 and Cap2 may be immunogenic in mammals, such as humans, due to recognition as “non-self” by components of the innate immune system such as IFIT-1 and IFIT-5, which can result in elevated cytokine levels including type I interferon. Components of the innate immune system such as IFIT-1 and IFIT-5 may also compete with eIF4E for binding of a nucleic acids with a cap other than Cap1 or Cap2, potentially inhibiting translation of the nucleic acid.

[0300] A cap can be included co-transcriptionally. For example, ARCA (anti-reverse cap analog; Thermo Fisher Scientific Cat. No. AM8045) is a cap analog comprising a 7-methylguanine 3′-methoxy-5′-triphosphate linked to the 5′ position of a guanine ribonucleotide which can be incorporated in vitro into a transcript at initiation. ARCA results in a Cap0 cap or a Cap0-like cap in which the 2′ position of the first cap-proximal nucleotide is hydroxyl. See, e.g., Stepinski et al., (2001) “Synthesis and properties of mRNAs containing the novel ‘anti-reverse’ cap analogs 7-methyl(3′-O-methyl)GpppG and 7-methyl(3′deoxy)GpppG,” RNA 7: 1486-1495. The ARCA structure is shown below.

[chemical structure]

[0301] CleanCap™ AG (m7G(5′)ppp(5′)(2′OMeA)pG; TriLink Biotechnologies Cat. No. N7113) or CleanCap™ GG (m7G(5′)ppp(5′)(2′OMeG)pG; TriLink Biotechnologies Cat. No. N-7133) can be used to provide a Cap1 structure co-transcriptionally. 3′-O-methylated versions of CleanCap™ AG and CleanCap™ GG are also available from TriLink Biotechnologies as Cat. Nos. N-7413 and N-7433, respectively. The CleanCap™ AG structure is shown below. CleanCap™ structures are sometimes referred to herein using the last three digits of the catalog numbers listed above (e.g., “CleanCap™ 113” for TriLink Biotechnologies Cat. No. N-7113).

[chemical structure]

[0302] Alternatively, a cap can be added to an RNA post-transcriptionally. For example, Vaccinia capping enzyme is commercially available (New England Biolabs Cat. No. M2080S) and has RNA triphosphatase and guanylyltransferase activities, provided by its D1 subunit, and guanine methyltransferase, provided by its D12 subunit. As such, it can add a 7-methylguanine to an RNA, so as to give Cap0, in the presence of S-adenosyl methionine and GTP. See, e.g., Guo, P. and Moss, B. (1990) Proc. Natl. Acad. Sci. USA 87, 4023-4027; Mao, X. and Shuman, S. (1994) J. Biol. Chem. 269, 24472-24479. For additional discussion of caps and capping approaches, see, e.g., WO2017/053297 and Ishikawa et al., Nucl. Acids. Symp. Ser. (2009) No. 53, 129-130.

### V. CELLS

[0303] In some embodiments, a cell contacted with the first genome editing tool or the second genome editing tool is a human cell.

[0304] In some embodiments, a cell is contacted with (a) a first genome editing tool, wherein the first genome editing tool comprises a first genomic editor and at least one guide RNA (gRNA) that targets at least one genomic locus and that is cognate to the first genomic editor; and (b) a second genome editing tool, wherein the second genome editing tool comprises a second genomic editor and at least one gRNA that targets at least one genomic locus and that is cognate to the second genomic editor, wherein the first genomic editor is orthogonal to the second genomic editor, thereby producing at least two genome edits in the cell.

[0305] In some embodiments, a cell is contacted with (a) with a first genome editing tool comprising a first genomic editor comprising a base editor, and at least one guide RNA (gRNA) that targets at least one genomic locus and that is cognate to the base editor; and (b) with a second genome editing tool comprising a second genomic editor comprising an RNA-guided cleavase, and at least one gRNA that targets at least one genomic locus and that is cognate to the RNA-guided cleavase, wherein the base editor is orthogonal to the RNA-guided cleavase, thereby producing at least two genome edits in the cell.

[0306] In some embodiments, a cell is contacted with (a) with a first genome editing tool comprising a first genomic editor comprising a base editor, and at least one guide RNA (gRNA) that targets at least one genomic locus and that is cognate to the base editor; and (b) with a second genome editing tool comprising a second genomic editor comprising an RNA-guided cleavase, and at least one gRNA that targets at least one genomic locus and that is cognate to the RNA-guided cleavase, wherein the base editor is orthogonal to the RNA-guided cleavase; in some embodiments, the cell is (c) cultured, thereby producing a population of cells comprising edited cells comprising at least two genome edits per cell.

[0307] In some embodiments, a cell is treated in vitro with any method or composition disclosed herein. In some embodiments, a cell is treated in vivo with any method or composition disclosed herein.

[0308] In some embodiments, the cell in any of the embodiments provided herein is engineered by a first genome editing tool and a second genome editing tool. In some embodiment, the first genome editing tool comprises a C to T base editor or an A to G base editor. In some embodiments, the first genome editing tool comprises a first genomic editor comprising a cytidine deaminase and an RNA-guided nickase, or a nucleic acid encoding the polypeptide. In some embodiments, the cytidine deaminase is APOBEC3A deaminase (A3A). In some embodiments, the first genomic editor comprises an amino acid sequence that is at least 80%, 85%, 90%, 95%, 98%, or 100% identical to SEQ ID NO: 3, SEQ ID NO: 146 or SEQ ID NO: 311. In some embodiments, the nucleic acid encoding the first genomic editor comprises a sequence that is at least 80%, 85%, 90%, 95%, 98%, or 100% identical to SEQ ID NO: 1, SEQ ID NO: 147, or SEQ ID NO: 310. In some embodiments, the first genomic editor comprises an amino acid sequence that is at least 80%, 85%, 90%, 95%, 98%, or 100% identical to any one of SEQ ID NOs: 9, 12, 18, and 21.

[0309] In some embodiments, the first genome editing tool or the second genome editing tool is delivered to the cell via electroporation. In some embodiments, the first genome editing tool or the second genome editing tool is delivered to the cell via at least one lipid nanoparticle (LNP). In some embodiments, the first genome editing tool or the second genome editing tool is contained in at least one LNP. In some embodiments, the first genome editing tool or the second genome editing tool is delivered to the cell on at least one vector. In some embodiments, the first genome editing tool or the second genome editing tool comprises at least one vector. In some embodiments, the first genome editing tool or the second genome editing tool is delivered as at least one nucleic acid encoding the first genome editing tool or the second genome editing tool. In some embodiments, the first genome editing tool or the second genome editing tool comprises at least one nucleic acid encoding the first genome editing tool or the second genome editing tool. In some embodiments, the first genome editing tool comprises at least one polypeptide comprising the first genome editing tool or at least one nucleic acid encoding the first genome editing tool. In some embodiments, the second genome editing tool comprises at least one polypeptide comprising the second genome editing tool or at least one nucleic acid encoding the second genome editing tool. In some embodiments, the at least one nucleic acid comprises at least one mRNA. In some embodiments, the first genomic editor or the second genomic editor is delivered to the cell as at least one polypeptide or at least one mRNA. In some embodiments, the first genomic editor or the second genomic editor comprises at least one polypeptide or at least one mRNA. In some embodiments, the at least one gRNA is delivered to the cell as at least one polynucleotide that encodes the gRNA. In some embodiments, the cell is contacted with a nucleic acid encoding an exogenous gene for insertion into a genomic locus. In some embodiments, the cell is contacted with a nucleic acid encoding an exogenous gene for insertion into the TRAC or AAVS1 locus

[0310] In some embodiments, in any of the methods disclosed herein, step (a) and step (b) of contacting the cell are performed simultaneously. In some embodiments, step (a) and step (b) of contacting the cell are performed in any order over a time period of about 5 minutes, 10 minutes, 15 minutes, 30 minutes, 1 hour, 2 hours, 3 hours, 4 hours, 5 hours, 6 hours, 7 hours, 8 hours, 9 hours, 10 hours, 11 hours, 12 hours, 13 hours, 14 hours, 15 hours, 16 hours, 17 hours, 18 hours, 19 hours, 20 hours, 21 hours, 22 hours, 23 hours, 24 hours, 30 hours, 36 hours, or 48 hours. In some embodiments, each of step (a) and step (b) is independently performed over a time period of about 5 minutes, 10 minutes, 15 minutes, 30 minutes, 1 hour, 2 hours, 3 hours, 4 hours, 5 hours, 6 hours, 7 hours, 8 hours, 9 hours, 10 hours, 11 hours, 12 hours, 13 hours, 14 hours, 15 hours, 16 hours, 17 hours, 18 hours, 19 hours, 20 hours, 21 hours, 22 hours, 23 hours, 24 hours, 30 hours, 36 hours, or 48 hours.

[0311] In some embodiments, the cell is an immune cell. As used herein, “immune cell” refers to a cell of the immune system, including e.g., a lymphocyte (e.g., T cell, B cell, natural killer cell (“NK cell”, and NKT cell, or iNKT cell)), monocyte, macrophage, mast cell, dendritic cell, or granulocyte (e.g., neutrophil, eosinophil, and basophil). In some embodiments, the cell is a primary immune cell. In some embodiments, the immune system cell may be selected from CD3⁺, CD4⁺ and CD8⁺ T cells, regulatory T cells (Tregs), B cells, NK cells, and dendritic cells (DC). In some embodiments, the immune cell is allogeneic.

[0312] In some embodiments, the cell is a lymphocyte. In some embodiments, the cell is an adaptive immune cell. In some embodiments, the cell is a T cell. In some embodiments, the cell is a B cell. In some embodiments, the cell is a NK cell.

[0313] As used herein, a T cell can be defined as a cell that expresses a T cell receptor (“TCR” or “αβ TCR” or “γδ TCR”), however in some embodiments, the TCR of a T cell may be genetically modified to reduce its expression (e.g., by genetic modification to the TRAC or TRBC genes), therefore expression of the protein CD3 may be used as a marker to identify a T cell by standard flow cytometry methods. CD3 is a multi-subunit signaling complex that associates with the TCR. Thus, a T cell may be referred to as CD3+. In some embodiments, a T cell is a cell that expresses a CD3+ marker and either a CD4+ or CD8+ marker.

[0314] In some embodiments, the T cell expresses the glycoprotein CD8 and therefore is CD8+ by standard flow cytometry methods and may be referred to as a “cytotoxic” T cell. In some embodiments, the T cell expresses the glycoprotein CD4 and therefore is CD4+ by standard flow cytometry methods and may be referred to as a “helper” T cell. CD4+ T cells can differentiate into subsets and may be referred to as a Th1 cell, Th2 cell, Th9 cell, Th17 cell, Th22 cell, T regulatory (“Treg”) cell, or T follicular helper cells (“Tfh”). Each CD4+ subset releases specific cytokines that can have either proinflammatory or anti-inflammatory functions, survival or protective functions. A T cell may be isolated from a subject by CD4+ or CD8+ selection methods.

[0315] In some embodiments, the T cell is a memory T cell. In the body, a memory T cell has encountered antigen. A memory T cell can be located in the secondary lymphoid organs (central memory T cells) or in recently infected tissue (effector memory T cells). A memory T cell may be a CD8+ T cell. A memory T cell may be a CD4+ T cell.

[0316] As used herein, a “central memory T cell” can be defined as an antigen-experienced T cell, and for example, may express CD62L and CD45RO. A central memory T cell may be detected as CD62L+ and CD45RO+ by central memory T cells also express CCR7, therefore may be detected as CCR7+ by standard flow cytometry methods.

[0317] As used herein, an “early stem-cell memory T cell” (or “Tscm”) can be defined as a T cell that expresses CD27 and CD45RA, and therefore is CD27+ and CD45RA+ by standard flow cytometry methods. A Tscm does not express the CD45 isoform CD45RO, therefore a Tscm will further be CD45RO− if stained for this isoform by standard flow cytometry methods. A CD45RO− CD27+ cell is therefore also an early stem-cell memory T cell. Tscm cells further express CD62L and CCR7, therefore may be detected as CD62L+ and CCR7+ by standard flow cytometry methods. Early stem-cell memory T cells have been shown to correlate with increased persistence and therapeutic efficacy of cell therapy products.

[0318] In some embodiments, the cell is a B cell. As used herein, a “B cell” can be defined as a cell that expresses CD19 or CD20, or B cell mature antigen (“BCMA”), and therefore a B cell is CD19+, or CD20+, or BCMA+ by standard flow cytometry methods. A B cell is further negative for CD3 and CD56 by standard flow cytometry methods. The B cell may be a plasma cell. The B cell may be a memory B cell. The B cell may be a naïve B cell. The B cell may be IgM+ or has a class-switched B cell receptor (e.g., IgG+, or IgA+).

[0319] In some embodiments, the cell is a mononuclear cell, such as from bone marrow or peripheral blood. In some embodiments, the cell is a peripheral blood mononuclear cell (“PBMC”). In some embodiments, the cell is a PBMC, e.g. a lymphocyte or monocyte. In some embodiments, the cell is a peripheral blood lymphocyte (“PBL”).

[0320] In some embodiments, the cell is derived from a progenitor cell before editing. In some embodiments, the cell is an induced pluripotent stem cell (iPSC).

[0321] Cells used in ACT therapy are included, such as mesenchymal stem cells (e.g., isolated from bone marrow (BM), peripheral blood (PB), placenta, umbilical cord (UC) or adipose); hematopoietic stem cells (HSCs; e.g. isolated from BM); mononuclear cells (e.g., isolated from BM or PB); endothelial progenitor cells (EPCs; isolated from BM, PB, and UC); neural stem cells (NSCs); limbal stem cells (LSCs); or tissue-specific primary cells or cells derived therefrom (TSCs). Cells used in ACT therapy further include induced pluripotent stem cells (iPSCs; see e.g., Mahla, International J. Cell Biol. 2016 (Article ID 6940283): 1-24 (2016)) that may be induced to differentiate into other cell types including e.g., islet cells, neurons, and blood cells; ocular stem cells; pluripotent stem cells (PSCs); embryonic stem cells (ESCs); cells for organ or tissue transplantations such as islet cells, cardiomyocytes, thyroid cells, thymocytes, neuronal cells, skin cells, retinal cells, chondrocytes, myocytes, and keratinocytes.

[0322] In some embodiments, the cell is a human cell, such as a cell from a subject. In some embodiments, the cell is isolated from a human subject. In some embodiments, the cell is isolated from a patient. In some embodiments, the cell is isolated from a donor. In some embodiments, the cell is isolated from human donor PBMCs or leukopaks. In some embodiments, the cell is from a subject with a condition, disorder, or disease. In some embodiments, the cell is from a human donor with Epstein Barr Virus (“EBV”).

[0323] In some embodiments, the cell is homozygous for HLA-B and homozygous for HLA-C. In some embodiments, the cell contains a genetic modification in the HLA-A gene and is homozygous for HLA-B and homozygous for HLA-C. In some embodiments, the cell is homozygous for HLA-A and homozygous for HLA-C. In some embodiments, the cell contains a genetic modification in the HLA-B gene and is homozygous for HLA-A and homozygous for HLA-C. In some embodiments, the cell is homozygous for HLA-C. In some embodiments, the cell contains a genetic modification in the HLA-A gene and a genetic modification in the HLA-B gene and is homozygous for HLA-C.

[0324] In some embodiments, the methods disclosed herein are carried out ex vivo. As used herein, “ex vivo” refers to an in vitro method wherein the cell is capable of being transferred into a subject, e.g. as an ACT therapy. In some embodiments, an ex vivo method is an in vitro method involving an ACT therapy cell or cell population.

[0325] In some embodiments, the cell is maintained in culture. In some embodiments, the cell is transplanted into a patient. In some embodiments, the cell is removed from a subject, genetically modified ex vivo, and then administered back to the same patient. In some embodiments, the cell is removed from a subject, genetically modified ex vivo, and then administered to a subject other than the subject from which it was removed.

[0326] In some embodiments, the cell is from a cell line. In some embodiments, the cell line is derived from a human subject. In some embodiments, the cell line is a lymphoblastoid cell line (“LCL”). The cell may be cryopreserved and thawed. The cell may not have been previously cryopreserved.

[0327] In some embodiments, the cell is from a cell bank. In some embodiments, the cell is genetically modified and then transferred into a cell bank. In some embodiments the cell is removed from a subject, genetically modified ex vivo, and transferred into a cell bank. In some embodiments, a genetically modified population of cells is transferred into a cell bank. In some embodiments, a genetically modified population of immune cells is transferred into a cell bank. In some embodiments, a genetically modified population of immune cells comprising a first and second subpopulations, wherein the first and second sub-populations have at least one common genetic modification and at least one different genetic modification are transferred into a cell bank.

[0328] In some embodiments, a population of cells comprises any cell edited using any method or composition disclosed herein.

[0329] In some embodiments, a population of cells comprises edited T cells, and wherein at least 30%, 40%, 50%, 55%, 60%, 65% of the cells of the population have a memory phenotype (CD27+, CD45RA+).

[0330] In some embodiments, a population of cells comprises non-activated immune cells. In some embodiments, the population of cells comprises activated immune cells.

[0331] In some embodiments, a population of cells comprises T cells and is responsive to repeat stimulation after editing. In some embodiments, the population of cells is cultured, expanded, differentiated, or proliferated ex vivo.

### VI. GUIDE RNAS AND DONOR NUCLEIC ACIDS

[0332] In some embodiments, the first genome editing tool comprises a first genomic editor and at least one guide RNA (gRNA) that targets at least one genomic locus and that is cognate to the first genomic editor. In some embodiments, the first genome editing tool comprises a first genomic editor comprising a base editor, and at least one guide RNA (gRNA) that targets at least one genomic locus and that is cognate to the base editor.

[0333] In some embodiments, the second genome editing tool comprises a comprises a second genomic editor and at least one gRNA that targets at least one genomic locus and that is cognate to the second genomic editor, wherein the first genomic editor is orthogonal to the second genomic editor. In some embodiments, the second genome editing tool comprises a second genomic editor comprising an RNA-guided cleavase, and at least one gRNA that targets at least one genomic locus and that is cognate to the RNA-guided cleavase, wherein the base editor is orthogonal to the RNA-guided cleavase.

[0334] In some embodiments, the at least one gRNA that is cognate to the first genomic editor or the base editor is non-cognate to the second genomic editor or the RNA-guided cleavase. In some embodiments, the at least one gRNA that is cognate to the second genomic editor or the RNA-guided cleavase is non-cognate to the first genomic editor or the base editor.

[0335] In some embodiments, the at least one gRNA that is cognate to the first genomic editor or the base editor comprises at least two gRNAs that target at least two different genomic loci. In some embodiments, the at least one gRNA that is cognate to the second genomic editor or the RNA-guided cleavase comprises at least two gRNAs that target at least two different genomic loci. In some embodiments, the at least one gRNA that is cognate to the first genomic editor or the base editor comprises at least three gRNAs that target at least three different genomic loci. In some embodiments, the at least one gRNA that is cognate to the second genomic editor or the RNA-guided cleavase comprises at least three gRNAs that target at least three different genomic loci. In some embodiments, the at least one gRNA that is cognate to the first genomic editor or the base editor comprises at least four gRNAs that target at least four different genomic loci. In some embodiments, the at least one gRNA that is cognate to the second genomic editor or the RNA-guided cleavase comprises at least four gRNAs that target at least four different genomic loci. In some embodiments, the at least one gRNA that is cognate to the first genomic editor or the base editor comprises at least five gRNAs that target at least five different genomic loci. In some embodiments, the at least one gRNA that is cognate to the second genomic editor or the RNA-guided cleavase comprises at least five gRNAs that target at least five different genomic loci. In some embodiments, the at least one gRNA that is cognate to the first genomic editor or the base editor comprises at least six gRNAs that target at least six different genomic loci. In some embodiments, the first genomic editor and one, two, three, four, five, or six of the at least one gRNA that are cognate to the first genomic editor or the base editor and target different genomic loci are contained in a same lipid nanoparticle (LNP). In some embodiments, the base editor or the at least one gRNA that is cognate to the second genomic editor or the RNA-guided cleavase comprises at least six gRNAs that target at least six different genomic loci.

### A. Target Sequences and Genes

[0336] In some embodiments, the methods and compositions of the present disclosure utilize a CRISPR/Cas system to cleave a target sequence of at least one genomic loci targeted by a guide RNA. For example, a target sequence may be recognized and cleaved by a Cas nuclease. In some embodiments, a target sequence for a Cas nuclease is located near the nuclease's cognate PAM sequence. In some embodiments, a Class 2 Cas nuclease may be directed by a gRNA to a target sequence of a gene, where the gRNA hybridizes with and the Class 2 Cas protein cleaves the target sequence. In some embodiments, the guide RNA hybridizes with and a Class 2 Cas nuclease cleaves the target sequence adjacent to or comprising its cognate PAM. In some embodiments, the target sequence may be complementary to a targeting sequence of the guide RNA. In some embodiments, the degree of complementarity between a targeting sequence of a guide RNA and the portion of the corresponding target sequence that hybridizes to the guide RNA may be about 80%, 85%, 90%, 95%, 97%, 98%, 99%, or 100%. In some embodiments, the percent identity between a targeting sequence of a guide RNA and the portion of the corresponding target sequence that hybridizes to the guide RNA may be about 50%, 55%, 60%, 65%, 70%, 75%, 80%, 85%, 90%, 95%, 97%, 98%, 99%, or 100%. In some embodiments, the homology region of the target is adjacent to a cognate PAM sequence. In some embodiments, the target sequence may comprise a sequence 100% complementary with the targeting sequence of the guide RNA. In other embodiments, the target sequence may comprise at least one mismatch, deletion, or insertion, as compared to the targeting sequence of the guide RNA.

[0337] The length of the target sequence may depend on the nuclease system used. For example, the targeting sequence of a guide RNA for a CRISPR/Cas system may comprise 10, 11, 12, 13, 14, 15, 16, 17, 18, 19, 20, 21, 22, 23, 24, 25, 26, 27, 28, 29, 30, 35, 40, 45, 50, or more than 50 nucleotides in length and the target sequence is a corresponding length, optionally adjacent to a PAM sequence. In some embodiments, the target sequence may comprise 15-24 nucleotides in length. In some embodiments, the target sequence may comprise 17-21 nucleotides in length. In some embodiments, the target sequence may comprise 20 nucleotides in length. In some embodiments, the target sequence may comprise 24 nucleotides in length. When nickases are used, the target sequence may comprise a pair of target sequences recognized by a pair of nickases that cleave opposite strands of the DNA molecule. In some embodiments, the target sequence may comprise a pair of target sequences recognized by a pair of nickases that cleave the same strands of the DNA molecule. In some embodiments, the target sequence may comprise a part of target sequences recognized by one or more Cas nucleases.

[0338] The target nucleic acid molecule may be any DNA or RNA molecule that is endogenous or exogenous to a cell. In some embodiments, the target nucleic acid molecule may be an episomal DNA, a plasmid, a genomic DNA, viral genome, or chromosomal DNA. In some embodiments, the target sequence of the gene may be a genomic sequence from a cell or in a cell, including a human cell.

[0339] In further embodiments, the target sequence may be a viral sequence. In further embodiments, the target sequence may be a pathogen sequence. In yet other embodiments, the target sequence may be a synthesized sequence. In further embodiments, the target sequence may be a chromosomal sequence. In certain embodiments, the target sequence may comprise a translocation junction, e.g., a translocation associated with a cancer. In some embodiments, the target sequence may be on a eukaryotic chromosome, such as a human chromosome.

[0340] In some embodiments, the target sequence may be located in a genomic locus; for example, the target sequence may be located in a coding sequence of a gene, an intron sequence of a gene, a regulatory sequence, a transcriptional control sequence of a gene, a translational control sequence of a gene, a splicing site, or a non-coding sequence between genes (e.g., intergenic space). In some embodiments, the gene may be a protein coding gene. In other embodiments, the gene may be a non-coding RNA gene. In some embodiments, the target sequence may comprise all or a portion of a disease-associated gene. In some embodiments, the target sequence may be located in a non-genic functional site in the genome, for example a site that controls aspects of chromatin organization, such as a scaffold site or locus control region.

[0341] In some embodiments involving a Cas nuclease, such as a Class 2 Cas nuclease, the target sequence may be adjacent to a protospacer adjacent motif (“PAM”). In some embodiments, the PAM may be adjacent to or within 1, 2, 3, or 4, nucleotides of the 3′ end of the target sequence. The length and the sequence of the PAM may depend on the Cas protein used. For example, the PAM may be selected from a consensus or a particular PAM sequence for a specific Spy Cas9 protein or Spy Cas9 ortholog, including those disclosed in FIG. 1 of Ran et al., Nature, 520: 186-191 (2015), and Figure S5 of Zetsche 2015, the relevant disclosure of each of which is incorporated herein by reference. In some embodiments, the PAM may be 2, 3, 4, 5, 6, 7, 8, 9, or 10 nucleotides in length. Non-limiting exemplary PAM sequences include NGG, NGGNG, NG, NAAAAN, NNAAAAW, NNNNACA, GNNNCNNA, TTN, and NNNNGATT (wherein N is defined as any nucleotide, and W is defined as either A or T). In some embodiments, the PAM sequence may be NGG. In some embodiments, the PAM sequence may be NGGNG. In some embodiments, the PAM sequence may be TTN. In some embodiments, the PAM sequence may be NNAAAAW.

[0342] In some embodiments, the PAM may be selected from a consensus or a particular PAM sequence for a specific Nine Cas9 protein or Nine Cas9 ortholog (Edraki et al., 2019). In some embodiments, the Nine Cas9 PAM may comprise 2, 3, 4, 5, 6, 7, 8, 9, or 10 nucleotides in length. Non-limiting exemplary PAM sequences include NCC, N4GAYW, N4GYTT, N4GTCT, NNNNCC (a), NNNNCAAA (wherein N is defined as any nucleotide, W is defined as either A or T, and R is defined as either A or G; and (a) is a preferred, but not required, A after the second C)). In some embodiments, the PAM sequence may be NCC.

[0343] In some embodiments, the at least one gRNA that is cognate to the first genomic editor or the base editor or the at least one gRNA that is cognate to the second genomic editor or the RNA-guided cleavase comprises at least one single guide RNA (sgRNA). In some embodiments, the at least one gRNA that is cognate to the first genomic editor or the base editor or the at least one gRNA that is cognate to the second genomic editor or the RNA-guided cleavase is a short-single guide RNA (short-sgRNA) comprising a conserved portion of an sgRNA comprising a hairpin region, wherein the hairpin region lacks at least 5-10 nucleotides and wherein the short-sgRNA comprises a 5′ end modification or a 3′ end modification or both.

[0344] In some embodiments, the at least one gRNA that is cognate to the first genomic editor or the base editor targets one or more genes chosen from the TRBC locus, the HLA-A locus, the HLA-B locus, the CIITA locus, the HLA-DR locus, the HLA-DQ locus, and the HLA-DP locus. In some embodiments, the at least one gRNA that is cognate to the second genomic editor or the RNA-guided cleavase targets one or more genomic loci chosen from the TRAC locus, the AAVS1 locus, and the CIITA locus.

[0345] In some embodiments, (i) the at least one gRNA that is cognate to the first genomic editor or the base editor comprises a gRNA that targets the HLA-A locus and a gRNA that targets the CIITA locus, and the at least one gRNA that is cognate to the second genomic editor or the RNA-guided cleavase comprises a gRNA that targets the TRAC locus; (ii) the at least one gRNA that is cognate to the first genomic editor or the base editor comprises a gRNA that targets the TRBC locus, a gRNA that targets the HLA-A locus, and a gRNA that targets the CIITA locus, and the at least one gRNA that is cognate to the second genomic editor or the RNA-guided cleavase comprises a gRNA that targets the TRAC locus; (iii) the at least one gRNA that is cognate to the first genomic editor or the base editor comprises a gRNA that targets the HLA-A locus, a gRNA that targets the HLA-B locus, and a gRNA that targets the CIITA locus, and the at least one gRNA that is cognate to the second genomic editor or the RNA-guided cleavase comprises a gRNA that targets the TRAC locus; (iv) the at least one gRNA that is cognate to the first genomic editor or the base editor comprises a gRNA that targets the TRBC locus, a gRNA that targets the HLA-A locus, a gRNA that targets the HLA-B locus, and a gRNA that targets the CIITA locus, and the at least one gRNA that is cognate to the second genomic editor or the RNA-guided cleavase comprises a gRNA that targets the TRAC locus; (v) the at least one gRNA that is cognate to the first genomic editor or the base editor comprises a gRNA that targets the HLA-A locus and a gRNA that targets the HLA-DR locus, the HLA-DQ locus, or the HLA-DP locus, and the at least one gRNA that is cognate to the second genomic editor or the RNA-guided cleavase comprises a gRNA that targets the TRAC locus; (vi) the at least one gRNA that is cognate to the first genomic editor or the base editor comprises a gRNA that targets the TRBC locus, a gRNA that targets the HLA-A locus, and a gRNA that targets the HLA-DR locus, the HLA-DQ locus, or the HLA-DP locus, and the at least one gRNA that is cognate to the second genomic editor or the RNA-guided cleavase comprises a gRNA that targets the TRAC locus; (vii) the at least one gRNA that is cognate to the first genomic editor or the base editor comprises a gRNA that targets the HLA-A locus, a gRNA that targets the HLA-B locus, and a gRNA that targets the HLA-DR locus, the HLA-DQ locus, or the HLA-DP locus, and the at least one gRNA that is cognate to the second genomic editor or the RNA-guided cleavase comprises a gRNA that targets the TRAC locus; (viii) the at least one gRNA that is cognate to the first genomic editor or the base editor comprises a gRNA that targets the TRBC locus, a gRNA that targets the HLA-A locus, a gRNA that targets the HLA-B locus, and a gRNA that targets the HLA-DR locus, the HLA-DQ locus, or the HLA-DP locus, and the at least one gRNA that is cognate to the second genomic editor or the RNA-guided cleavase comprises a gRNA that targets the TRAC locus; (ix) the at least one gRNA that is cognate to the first genomic editor or the base editor comprises a gRNA that targets the TRAC locus, a gRNA that targets the TRBC locus, a gRNA that targets the CIITA locus, and a gRNA that targets the HLA-A locus, and the at least one gRNA that is cognate to the second genomic editor or the RNA-guided cleavase comprises a gRNA that targets the TRAC locus; (x) the at least one gRNA that is cognate to the first genomic editor or the base editor comprises a gRNA that targets the TRBC locus, a gRNA that targets the HLA-A locus, and a gRNA that targets the CIITA locus, and the at least one gRNA that is cognate to the second genomic editor or the RNA-guided cleavase comprises a gRNA that targets the AAVS1 locus; (xi) the at least one gRNA that is cognate to the first genomic editor or the base editor comprises a gRNA that targets the TRBC locus, a gRNA that targets the HLA-A locus, a gRNA that targets the HLA-B locus, and a gRNA that targets the CIITA locus, and the at least one gRNA that is cognate to the second genomic editor or the RNA-guided cleavase comprises a gRNA that targets the AAVS1 locus; (xii) the at least one gRNA that is cognate to the first genomic editor or the base editor comprises a gRNA that targets the TRBC locus, a gRNA that targets the HLA-A locus, and a gRNA that targets the HLA-DR locus, the HLA-DQ locus, or the HLA-DP locus, and the at least one gRNA that is cognate to the second genomic editor or the RNA-guided cleavase comprises a gRNA that targets the AAVS1 locus; (xiii) the at least one gRNA that is cognate to the first genomic editor or the base editor comprises a gRNA that targets the TRBC locus, a gRNA that targets the HLA-A locus, a gRNA that targets the HLA-B locus, and a gRNA that targets the HLA-DR locus, the HLA-DQ locus, or the HLA-DP locus, and the at least one gRNA that is cognate to the second genomic editor or the RNA-guided cleavase comprises a gRNA that targets the AAVS1 locus.

[0346] In some embodiments, in any one of subparts (i)-(ix) above, the at least one gRNA that is cognate to the second genomic editor or the RNA-guided cleavase comprises a further gRNA that targets the AAVS1 locus. In some embodiments, in any one of subparts (x)-(xiii) above, the at least one gRNA that is cognate to the second genomic editor or the RNA-guided cleavase comprises a further gRNA that targets the TRAC locus. In some embodiments, the cell is contacted with the further gRNA that targets the AAVS1 locus after the cell is contacted with the gRNA that targets the TRAC locus. In some embodiments, the cell is contacted with the further gRNA that targets the TRAC locus after the cell is contacted with the gRNA that targets the AAVS1 locus.

B. Modified gRNAs

[0347] In the case of a sgRNA, the above guide sequences may further comprise additional nucleotides to form a sgRNA, e.g., with the following exemplary nucleotide sequence following the 3′ end of the guide sequence: GUUUUAGAGCUAGAAAUAGCAAGUUAAAAUAAGGCUAGUCCGUUAUCAACUU GAAAAAGUGGCACCGAGUCGGUGC (SEQ ID NO: 226) in 5′ to 3′ orientation.

[0348] In the case of a sgRNA, the above guide sequences may further comprise additional nucleotides to form a sgRNA, e.g., with the following exemplary nucleotide sequence following the 3′ end of the guide sequence: GUUUUAGAGCUAGAAAUAGCAAGUUAAAAUAAGGCUAGUCCGUUAUCAACUU GAAAAAGUGGCACCGAGUCGGUGCUUUU (SEQ ID NO: 227) in 5′ to 3′ orientation.

[0349] In the case of a sgRNA, the guide sequences may be integrated into the following modified motif: mN*mN*m*NNNNNNNNNNNNNNGUUUUAGAmGmCmUmAmGmAmAmAmU mAmGmCAAGUUAAAAUAAGGCUAGUCCGUUAUCAmAmCmUmUmGmAmAmAm AmAmGmUmGmGmCmAmCmCmGmAmGmUmCmGmGmUmGmCmU*mU*mU*mU (SEQ ID NO: 228), where “N” may be any natural or non-natural nucleotide, preferably an RNA nucleotide; sugar moieties of the nucleotide can be ribose, deoxyribose, or similar compounds with substitutions; m is a 2′-O-methyl modified nucleotide, and * is a phosphorothioate linkage to the adjacent nucleotide residue; and wherein the N's are collectively the nucleotide sequence of a guide sequence. In the context of a modified sequence, unless otherwise indicated, A, C, G, N, and U are an unmodified RNA nucleotide, i.e., a 2′-OH sugar moiety with a phosphodiesterase linkage to the adjacent nucleotide residue, or a 5′-terminal P04.

[0350] In the case of a sgRNA, the guide sequences may further comprise a SpyCas9 sgRNA sequence. An example of a SpyCas9 sgRNA sequence is shown in Table YY (SEQ ID NO: 226: GUUUUAGAGC UAGAAAUAGC AAGUUAAAAU AAGGCUAGUC CGUUAUCAAC UUGAAAAAGU GGCACCGAGU CGGUGC—“Exemplary SpyCas9 sgRNA-1”), included at the 3′ end of the guide sequence, and provided with the domains as shown in Table YY below. LS is lower stem. B is bulge. US is upper stem. H1 and H2 are hairpin 1 and hairpin 2, respectively. Collectively H1 and H2 are referred to as the hairpin region. A model of the structure is provided in FIG. 10A of WO2019237069 which is incorporated herein by reference.

[0351] The nucleotide sequence of Exemplary SpyCas9 sgRNA-1 may serve as a template sequence for specific chemical modifications, sequence substitutions and truncations.

[0352] In certain embodiments, the gRNA is an sgRNA or a dgRNA, for example, and it optionally comprises a chemical modification. In some embodiments, the modified sgRNA comprises a guide sequence and a SpyCas9 sgRNA sequence, e.g., Exemplary SpyCas9 sgRNA-1. A gRNA, such as an sgRNA, may include modifications on the 5′ end of the guide sequence or on the 3′ end of the SpyCas9 sgRNA sequence, such as, e.g., Exemplary SpyCas9 sgRNA-1 at one or more of the terminal nucleotides, e.g., at 1, 2, 3, or 4 of the nucleotides at the 3′ end or at the 5′ end. In certain embodiments, the modified nucleotide is selected from a 2′-O-methyl (2′-OMe) modified nucleotide, a 2′-O-(2-methoxyethyl) (2′-O-moe) modified nucleotide, a 2′-fluoro (2′-F) modified nucleotide, a phosphorothioate (PS) linkage between nucleotides, or an inverted abasic modified nucleotide; or a combination thereof. In certain embodiments, the modified nucleotide includes a 2′-OMe modified nucleotide. In certain embodiments, the modified nucleotide includes a PS linkage. In certain embodiments, the modified nucleotide includes a 2′-OMe modified nucleotide and a PS linkage.

[0353] In certain embodiments, using SEQ ID NO: 226 (“Exemplary SpyCas9 sgRNA-1”) as an example, the Exemplary SpyCas9 sgRNA-1 further includes one or more of: (A) a shortened hairpin 1 region, or a substituted and optionally shortened hairpin 1 region, wherein (1) at least one of the following pairs of nucleotides are substituted in hairpin 1 with Watson-Crick pairing nucleotides: H1-1 and H1-12, H1-2 and H1-11, H1-3 and H1-10, or H1-4 and H1-9, and the hairpin 1 region optionally lacks (a) any one or two of H1-5 through H1-8, (b) one, two, or three of the following pairs of nucleotides: H1-1 and H1-12, H1-2 and H1-11, H1-3 and H1-10, and H1-4 and H1-9, or (c) 1-8 nucleotides of hairpin 1 region; or (2) the shortened hairpin 1 region lacks 4-8 nucleotides, preferably 4-6 nucleotides, and (a) one or more of positions H1-1, H1-2, or H1-3 is deleted or substituted relative to Exemplary SpyCas9 sgRNA-1 (SEQ ID NO: 226), or (b) one or more of positions H1-6 through H1-10 is substituted relative to Exemplary SpyCas9 sgRNA-1 (SEQ ID NO: 226); or (3) the shortened hairpin 1 region lacks 5-10 nucleotides, preferably 5-6 nucleotides, and one or more of positions N18, H1-12, or n is substituted relative to Exemplary SpyCas9 sgRNA-1 (SEQ ID NO: 226); or (B) a shortened upper stem region, wherein the shortened upper stem region lacks 1-6 nucleotides and wherein the 6, 7, 8, 9, 10, or 11 nucleotides of the shortened upper stem region include less than or equal to 4 substitutions relative to Exemplary SpyCas9 sgRNA-1 (SEQ ID NO: 226); or (C) a substitution relative to Exemplary SpyCas9 sgRNA-1 (SEQ ID NO: 226) at any one or more of LS6, LS7, US3, US10, B3, N7, N15, N17, H2-2 and H2-14, wherein the substituent nucleotide is neither a pyrimidine that is followed by an adenine, nor an adenine that is preceded by a pyrimidine; or (D) an Exemplary SpyCas9 sgRNA-1 (SEQ ID NO: 226) with an upper stem region, wherein the upper stem modification comprises a modification to any one or more of US1-US12 in the upper stem region, wherein (1) the modified nucleotide is optionally selected from a 2′-O-methyl (2′-OMe) modified nucleotide, a 2′-O-(2-methoxyethyl) (2′-O-moe) modified nucleotide, a 2′-fluoro (2′-F) modified nucleotide, a phosphorothioate (PS) linkage between nucleotides, an inverted abasic modified nucleotide, or a combination thereof, or (2) the modified nucleotide optionally includes a 2′-OMe modified nucleotide.

[0354] In some embodiments, the sgRNA comprises a modified motif disclosed herein, including the modified motif of any one of SEQ ID NOs: 228-242 and 246-250, 312-314 or any other modified motif shown in the Table of Sequences, where “N” may be any natural or non-natural nucleotide, preferably an RNA nucleotide; sugar moieties of the nucleotide can be ribose, deoxyribose, or similar compounds with substitutions; m is a 2′-O-methyl modified nucleotide, and * is a phosphorothioate linkage to the adjacent nucleotide residue; and wherein the N's are collectively the nucleotide sequence of a guide sequence.

[0355] In certain embodiments, using SEQ ID NO: 400 (“Exemplary NmeCas9 sgRNA-1” as shown in Table 20) as an example, the Exemplary NmeCas9 sgRNA-1 includes: (A) A guide RNA (gRNA) comprising a guide region and a conserved region, the conserved region comprising one or more of: (a) a shortened repeat/anti-repeat region, wherein the shortened repeat/anti-repeat region lacks 2-24 nucleotides, wherein (i) one or more of nucleotides 37-48 and 53-64 is deleted and optionally one or more of nucleotides 37-64 is substituted relative to SEQ ID NO: 400; and (ii) nucleotide 36 is linked to nucleotide 65 by at least 2 nucleotides; or (b) a shortened hairpin 1 region, wherein the shortened hairpin 1 lacks 2-10, optionally 2-8 nucleotides, wherein (i) one or more of nucleotides 82-86 and 91-95 is deleted and optionally one or more of positions 82-96 is substituted relative to SEQ ID NO: 400; and (ii) nucleotide 81 is linked to nucleotide 96 by at least 4 nucleotides; or (c) a shortened hairpin 2 region, wherein the shortened hairpin 2 lacks 2-18, optionally 2-16 nucleotides, wherein (i) one or more of nucleotides 113-121 and 126-134 is deleted and optionally one or more of nucleotides 113-134 is substituted relative to SEQ ID NO: 400; and (ii) nucleotide 112 is linked to nucleotide 135 by at least 4 nucleotides; wherein one or both nucleotides 144-145 are optionally deleted relative to SEQ ID NO: 400; wherein optionally at least 10 nucleotides are modified nucleotides.

[0356] Exemplary unmodified conserved portion nucleotide sequences include:

(SEQ ID NO: 243)
GUUGUAGCUCCCUUUCUCAUUUCGGAAACGAAAUGAGAACCGUUGCUAC
AAUAAGGCCGUCUGAAAAGAUGUGCCGCAACGCUCUGCCCCUUAAAGCU
UCUGCUUUAAGGGGCAUCGUUUA;
(SEQ ID NO: 244)
GUUGUAGCUCCCUGAAACCGUUGCUACAAUAAGGCCGUCGAAAGAUGUG
CCGCAACGCUCUGCCUUCUGGCAUCGUU,
and
(SEQ ID NO: 245)
GUUGUAGCUCCCUGGAAACCCGUUGCUACAAUAAGGCCGUCGAAAGAUG
UGCCGCAACGCUCUGCCUUCUGGCAUCGUUUAUU.

[0357] In the case of a sgRNA, the guide sequences may be integrated into one of the following exemplary modified conserved portion motifs:

(SEQ ID NO: 246)
GUUGmUmAmGmCUCCCmUmGmAmAmAmCmCGUUmGmCUAmCAAU*AAGm
GmCCmGmUmCmGmAmAmAmGmAmUGUGCmCGCmAmAmCmGCUCUmGmCC
mUmUmCmUGmGCmAmUC*mG*mU*mU
and
(SEQ ID NO: 247)
GUUGmUmAmGmCUCCCmUmGmAmAmAmCmCGUUmGmCUAmCAAU*AAGm
GmCCmGmUmCmGmAmAmAmGmAmUGUGCmCGmCAAmCGCUCUmGmCCmU
mUmCmUGGCAUCG*mU*mU.

[0358] In certain embodiments, the guide sequence is 20-25 nucleotides in length ((N)20-25), wherein each nucleotide may be independently modified. In certain embodiments, each of nucleotides 1-3 of the 5′ end of the guide is independently modified. In certain embodiments, each of nucleotides 1-3 of the 5′ end of the guide is independently modified with a 2′-OMe modification. In certain embodiments, each of nucleotides 1-3 of the 5′ end of the guide is independently modified with a phosphorothioate linkage to the adjacent nucleotide residue. In certain embodiments, each of nucleotides 1-3 of the 5′ end of the guide is independently modified with a 2′-OMe modification and a phosphorothioate linkage to the adjacent nucleotide residue.

[0359] In the case of a sgRNA, modified guide sequences may be integrated into one of the following exemplary modified conserved portion motifs:

(SEQ ID NO: 248)
mN*mNNNNNNNNmNNNmNNNNNNNNNNNNmGUUGmUmAmGmCUCCCmUm
GmAmAmAmCmCGUUmGmCUAmCAAU*AAGmGmCCmGmUmCmGmAmAmAm
GmAmUGUGCmCGCmAmAmCmGCUCUmGmCCmUmUmCmUGmGCmAmUC*m
G*mU*mU;
(SEQ ID NO: 249)
(N)₂₀₋₂₅ GUUGmUmAmGmCUCCCmUmGmAmAmAmCmCGUUmGmCUAmCA
AU*AAGmGmCCmGmUmCmGmAmAmAmGmAmUGUGCmCGCmAmAmCmGCU
CUmGmCCmUmUmCmUGmGCmAmUC*mG*mU*mU;
(SEQ ID NO: 250)
mN*mN*mN*mNmNNNmNmNNmNNmNNNNNmNNNNmNNNmGUUGmUmAmG
mCUCCCmUmGmAmAmAmCmCGUUmGmCUAmCAAU*AAGmGmCCmGmUmC
mGmAmAmAmGmAmUGUGCmCGmCAAmCGCUCUmGmCCmUmUmCmUGGCA
UCG*mU*mU;
or
any one of
(SEQ ID NO: 312)
mN*mN*mN*mNmNNNmNmNNmNNmNNNNNmNNNNmNNNmGUUGmUmAmG
mCUCCCmUmGmAmAmAmCmCGUUmGmCUAmCAAUAAGmGmCCmGmUmCm
GmAmAmAmGmAmUGUGCmCGmCAAmCGCUCUmGmCCmUmUmCmUGGCAU
CG*mU*mU,
(SEQ ID NO: 313)
mN*mN*mN*mNmNNNmNmNNmNNmNNNNNmNNNNmNNNmGUUGmUmAmG
mCUCCCmUmGmAmAmAmCmCGUUmGmCUAmCAAU*AAGmGmCCmGmUmC
mGmAmAmAmGmAmUGUGCmCGmCAAmCGmCmUmCmUmGmCCmUmUmCmU
GGCAUCG*mU*mU;
(SEQ ID NO: 314)
mN*mN*mN*mNmNNNmNmNNmNNmNNNNNmNNNNmNNNmGUUGmUmAmG
mCUCCCmUmGmAmAmAmCmCGUUmGmCUAmCAAUAAGmGmCCmGmUmCm
GmAmAmAmGmAmUGUGCmCGmCAAmCGmCmUmCmUmGmCCmUmUmCmUG
GCAUCG*mU*mU.

[0360] In certain embodiments, Exemplary SpyCas9 sgRNA-1, or an sgRNA, such as an sgRNA comprising an Exemplary SpyCas9 sgRNA-1, further includes a 3′ tail, e.g., a 3′ tail of 1, 2, 3, 4, or more nucleotides. In certain embodiments, the tail includes one or more modified nucleotides. In certain embodiments, the modified nucleotide is selected from a 2′-O-methyl (2′-OMe) modified nucleotide, a 2′-O-(2-methoxyethyl) (2′-O-moe) modified nucleotide, a 2′-fluoro (2′-F) modified nucleotide, a phosphorothioate (PS) linkage between nucleotides, an inverted abasic modified nucleotide; or a combination thereof. In certain embodiments, the modified nucleotide includes a 2′-OMe modified nucleotide. In certain embodiments, the modified nucleotide includes a PS linkage between nucleotides. In certain embodiments, the modified nucleotide includes a 2′-OMe modified nucleotide and a PS linkage between nucleotides.

[0361] In certain embodiments, the hairpin region includes one or more modified nucleotides. In certain embodiments, the modified nucleotide is selected from a 2′-O-methyl (2′-OMe) modified nucleotide, a 2′-O-(2-methoxyethyl) (2′-O-moe) modified nucleotide, a 2′-fluoro (2′-F) modified nucleotide, a phosphorothioate (PS) linkage between nucleotides, an inverted abasic modified nucleotide; or a combination thereof. In certain embodiments, the modified nucleotide includes a 2′-OMe modified nucleotide.

[0362] In certain embodiments, the upper stem region includes one or more modified nucleotides. In certain embodiments, the modified nucleotide selected from a 2′-O-methyl (2′-OMe) modified nucleotide, a 2′-O-(2-methoxyethyl) (2′-O-moe) modified nucleotide, a 2′-fluoro (2′-F) modified nucleotide, a phosphorothioate (PS) linkage between nucleotides, an inverted abasic modified nucleotide; or a combination thereof. In certain embodiments, the modified nucleotide includes a 2′-OMe modified nucleotide.

[0363] In certain embodiments, the Exemplary SpyCas9 sgRNA-1 comprises one or more YA dinucleotides, wherein Y is a pyrimidine, wherein the YA dinucleotide includes a modified nucleotide. In certain embodiments, the modified nucleotide selected from a 2′-O-methyl (2′-OMe) modified nucleotide, a 2′-O-(2-methoxyethyl) (2′-O-moe) modified nucleotide, a 2′-fluoro (2′-F) modified nucleotide, a phosphorothioate (PS) linkage between nucleotides, an inverted abasic modified nucleotide, or a combination thereof. In certain embodiments, the modified nucleotide includes a 2′-OMe modified nucleotide.

[0364] In certain embodiments, the Exemplary SpyCas9 sgRNA-1 comprises one or more YA dinucleotides, wherein Y is a pyrimidine, wherein the YA dinucleotide includes a sequence substituted nucleotide, wherein the pyrimidine is substituted for a purine. In certain embodiments, when the pyrimidine forms a Watson-Crick base pair in the single guide, the Watson-Crick based nucleotide of the sequence substituted pyrimidine nucleotide is substituted to maintain Watson-Crick base pairing.

[0365] In some embodiments, the gRNA is chemically modified. A gRNA comprising one or more modified nucleosides or nucleotides is called a “modified” gRNA or “chemically modified” gRNA, to describe the presence of one or more non-naturally or naturally occurring components or configurations that are used instead of or in addition to the canonical A, G, C, and U residues. In some embodiments, a modified gRNA is synthesized with a non-canonical nucleoside or nucleotide, is here called “modified.” Modified nucleosides and nucleotides can include one or more of: (i) alteration, e.g., replacement, of one or both of the non-linking phosphate oxygens or of one or more of the linking phosphate oxygens in the phosphodiester backbone linkage (an exemplary backbone modification); (ii) alteration, e.g., replacement, of a constituent of the ribose sugar, e.g., of the 2′ hydroxyl on the ribose sugar (an exemplary sugar modification); (iii) modification or replacement of a naturally occurring nucleobase, including with a non-canonical nucleobase (an exemplary base modification); and (iv) modification of the 3′ end or 5′ end of the oligonucleotide to provide exonuclease stability, e.g., with 2′ O-me, 2′ halide, or 2′ deoxy substituted ribose; or inverted abasic terminal nucleotide, or replacement of phosphodiester with phosphothioate.

[0366] Chemical modifications such as those listed above can be combined to provide modified gRNAs or mRNAs comprising nucleosides and nucleotides (collectively “residues”) that can have two, three, four, or more modifications. For example, a modified residue can have a modified sugar and a modified nucleobase. In certain embodiments, all, or substantially all, of the phosphate groups of a gRNA molecule are replaced with phosphorothioate groups. In some embodiments, modified gRNAs comprise at least one modified residue at or near the 5′ end of the RNA. In some embodiments, modified gRNAs comprise at least one modified residue at or near the 3′ end of the RNA.

[0367] In some embodiments, the gRNA comprises one, two, three or more modified residues. In some embodiments, at least 5% (e.g., at least 5%, 10%, 15%, preferably at least 20%, 25%, 30%, 35%, 40%, 45%, or 50%) of the positions in a modified gRNA are modified nucleosides or nucleotides. In some embodiments, at least 5% of the positions in the modified guide RNA are modified nucleotides or nucleosides. In some embodiments, at least 10% of the positions in the modified guide RNA are modified nucleotides or nucleosides. In some embodiments at least 15% of the positions in the modified gRNA are modified nucleotides or nucleosides. In some embodiments preferably at least 20% of the positions in the modified gRNA are modified nucleotides or nucleosides. In some embodiments, no more than 65% of the positions in the modified gRNA are modified nucleotides. In some embodiments, no more than 55% of the positions in the modified gRNA are modified nucleotides. In some embodiments, no more than 50% of the positions in the modified gRNA are modified nucleotides. In some embodiments, 10-70% of the positions in the modified gRNA are modified nucleotides. In some embodiments, 20-70% of the positions in the modified gRNA are modified nucleotides. In some embodiments, 20-50% of the positions in the modified gRNA are modified nucleotides and the nuclease is a SpyCas9 nuclease. In some embodiments, 30-70% of the positions in the modified gRNA are modified nucleotides and the nuclease is an NmeCas9 nuclease.

[0368] Unmodified nucleic acids can be prone to degradation by, e.g., intracellular nucleases or those found in serum. For example, nucleases can hydrolyze nucleic acid phosphodiester bonds. Accordingly, in one aspect the gRNAs described herein can contain one or more modified nucleosides or nucleotides, e.g., to introduce stability toward intracellular or serum-based nucleases. In some embodiments, the modified gRNA molecules described herein can exhibit a reduced innate immune response when introduced into a population of cells, both in vivo and ex vivo. The term “innate immune response” includes a cellular response to exogenous nucleic acids, including single stranded nucleic acids, which involves the induction of cytokine expression and release, particularly the interferons, and cell death.

[0369] In some embodiments of a backbone modification, the phosphate group of a modified residue can be modified by replacing one or more of the oxygens with a different substituent. Further, the modified residue, e.g., modified residue present in a modified nucleic acid, can include the replacement of an unmodified phosphate moiety with a modified phosphate group as described herein. In some embodiments, the backbone modification of the phosphate backbone can include alterations that result in either an uncharged linker or a charged linker with unsymmetrical charge distribution.

[0370] Examples of modified phosphate groups include, phosphorothioate, borano phosphate esters, methyl phosphonates, phosphoroamidates, phosphodithioate, alkyl or aryl phosphonates and phosphotriesters. The phosphorous atom in an unmodified phosphate group is achiral. However, replacement of one of the non-bridging oxygens with one of the above atoms or groups of atoms can render the phosphorous atom chiral. The stereogenic phosphorous atom can possess either the “R” configuration (herein Rp) or the “S” configuration (herein Sp). The backbone can also be modified by replacement of a bridging oxygen, (i.e., the oxygen that links the phosphate to the nucleoside), with nitrogen (bridged phosphoroamidates), sulfur (bridged phosphorothioates) and carbon (bridged methylenephosphonates). The replacement can occur at either linking oxygen or at both of the linking oxygens.

[0371] The phosphate group can be replaced by non-phosphorus containing connectors in certain backbone modifications, e.g., an amide linkage. In some embodiments, the charged phosphate group can be replaced by a neutral moiety. Examples of moieties which can replace the phosphate group can include, without limitation, e.g., methyl phosphonate, carboxymethyl, carbamate, amide, thioether. Further examples of moieties which can replace the phosphate group can include, without limitation, e.g., ethylene oxide linker, sulfonate, sulfonamide, thioformacetal, formacetal, methyleneimino, methylenemethylimino, methylenehydrazo, methylenedimethylhydrazo and methyleneoxymethylimino.

[0372] Scaffolds that can mimic nucleic acids can also be constructed wherein the phosphate linker and ribose sugar are replaced by nuclease resistant nucleoside or nucleotide surrogates. Such modifications may comprise backbone and sugar modifications. In some embodiments, the nucleobases can be tethered by a surrogate backbone. Examples can include, without limitation, the morpholino, cyclobutyl, pyrrolidine and peptide nucleic acid (PNA) nucleoside surrogates.

[0373] The modified nucleosides and modified nucleotides can include one or more modifications to the sugar group, i.e. at sugar modification. For example, the 2′ hydroxyl group (OH) can be modified, e.g. replaced with a number of different “oxy” or “deoxy” substituents. In some embodiments, modifications to the 2′ hydroxyl group can enhance the stability of the nucleic acid since the hydroxyl can no longer be deprotonated to form a 2′-alkoxide ion.

[0374] Examples of 2′ hydroxyl group modifications can include alkoxy or aryloxy (OR, wherein “R” can be, e.g., alkyl, cycloalkyl, aryl, aralkyl, heteroaryl or a sugar); polyethyleneglycols (PEG), O(CH2CH2O)nCH2CH2OR wherein R can be, e.g., H or optionally substituted alkyl, and n can be an integer from 0 to 20 (e.g., from 0 to 4, from 0 to 8, from 0 to 10, from 0 to 16, from 1 to 4, from 1 to 8, from 1 to 10, from 1 to 16, from 1 to 20, from 2 to 4, from 2 to 8, from 2 to 10, from 2 to 16, from 2 to 20, from 4 to 8, from 4 to 10, from 4 to 16, and from 4 to 20). In some embodiments, the 2′ hydroxyl group modification can be 2′-O-Me. In some embodiments, the 2′ hydroxyl group modification can be a 2′-fluoro modification, which replaces the 2′ hydroxyl group with a fluoride. In some embodiments, the 2′ hydroxyl group modification can include “locked” nucleic acids (LNA) in which the 2′ hydroxyl can be connected, e.g., by a C1-6 alkylene or C1-6 heteroalkylene bridge, to the 4′ carbon of the same ribose sugar, where exemplary bridges can include methylene, propylene, ether, or amino bridges; O-amino (wherein amino can be, e.g., NH2; alkylamino, dialkylamino, heterocyclyl, arylamino, diarylamino, heteroarylamino, or diheteroarylamino, ethylenediamine, or polyamino) and aminoalkoxy, O(CH2)n-amino, (wherein amino can be, e.g., NH2; alkylamino, dialkylamino, heterocyclyl, arylamino, diarylamino, heteroarylamino, or diheteroarylamino, ethylenediamine, or polyamino). In some embodiments, the 2′ hydroxyl group modification can include “unlocked” nucleic acids (UNA) in which the ribose ring lacks the C2′-C3′ bond. In some embodiments, the 2′ hydroxyl group modification can include the methoxyethyl group (MOE), (OCH2CH2OCH3, e.g., a PEG derivative). 2′ modifications can include hydrogen (i.e. deoxyribose sugars); halo (e.g., bromo, chloro, fluoro, or iodo); amino (wherein amino can be, e.g., NH2; alkylamino, dialkylamino, heterocyclyl, arylamino, diarylamino, heteroarylamino, diheteroarylamino, or amino acid); NH(CH2CH2NH)nCH2CH2-amino (wherein amino can be, e.g., as described herein), —NHC(O)R (wherein R can be, e.g., alkyl, cycloalkyl, aryl, aralkyl, heteroaryl or sugar), cyano; mercapto; alkyl-thio-alkyl; thioalkoxy; and alkyl, cycloalkyl, aryl, alkenyl and alkynyl, which may be optionally substituted with e.g., an amino as described herein.

[0375] The sugar modification can comprise a sugar group which may also contain one or more carbons that possess the opposite stereochemical configuration than that of the corresponding carbon in ribose. Thus, a modified nucleic acid can include nucleotides containing e.g., arabinose, as the sugar. The modified nucleic acids can also include abasic sugars. These abasic sugars can also be further modified at one or more of the constituent sugar atoms. The modified nucleic acids can also include one or more sugars that are in the L form, e.g. L-nucleosides. As used herein, a single abasic sugar is not understood to result in a discontinuity of a duplex.

[0376] In certain embodiments, 2′ modifications, include, for example, modifications include 2′-OMe, 2′-F, 2′-H, optionally 2′-O-Me.

[0377] The modified nucleosides and modified nucleotides described herein, which can be incorporated into a modified nucleic acid, can include a modified base, also called a nucleobase. Examples of nucleobases include, but are not limited to, adenine (A), guanine (G), cytosine (C), and uracil (U). These nucleobases can be modified or wholly replaced to provide modified residues that can be incorporated into modified nucleic acids. The nucleobase of the nucleotide can be independently selected from a purine, a pyrimidine, a purine analog, or pyrimidine analog. In some embodiments, the nucleobase can include, for example, naturally-occurring and synthetic derivatives of a base.

[0378] In embodiments employing a dual guide RNA, each of the crRNA and the tracr RNA can contain modifications. Such modifications may be at one or both ends of the crRNA or tracr RNA. In embodiments comprising an sgRNA, one or more residues at one or both ends of the sgRNA may be chemically modified, or internal nucleosides may be modified, or the sgRNA may be chemically modified throughout. Certain embodiments comprise a 5′ end modification. Certain embodiments comprise a 3′ end modification. Certain embodiments comprise a 5′ end modification and a 3′ end modification.

[0379] In some embodiments, the guide RNAs disclosed herein comprise one of the modification patterns disclosed in WO2018/107028, the contents of which are hereby incorporated by reference in their entirety. In some embodiments, the guide RNAs disclosed herein comprise one of the structures/modification patterns disclosed in US20170114334, the contents of which are hereby incorporated by reference in their entirety. In some embodiments, the guide RNAs disclosed herein comprise one of the structures/modification patterns disclosed in WO2017/136794, the contents of which are hereby incorporated by reference in their entirety. In some embodiments, the guide RNAs disclosed herein comprise one of the structures/modification patterns disclosed in WO2019/237069, the contents of which are hereby incorporated by reference in their entirety. In some embodiments, the guide RNAs disclosed herein comprise one of the structures/modification patterns disclosed in WO2021/119275, the contents of which are hereby incorporated by reference in their entirety. In some embodiments, the guide RNAs disclosed herein comprise one of the structures/modification patterns disclosed in U.S. Application No. 63/275,426, the contents of which are hereby incorporated by reference in their entirety.

### C. Exemplary Guide RNAs, Compositions, Methods, and Engineered Cells for AAVS1 Editing

[0380] The disclosure provides a guide RNA that target the AAVS1 locus. Guide sequences targeting the AAVS1 locus are shown in Table 5 at SEQ ID NOs: 251-264.

[0381] In some embodiments, the guide sequences are complementary to the corresponding genomic region shown in the Table 5 below, according to coordinates from human reference genome hg38. Guide sequences of further embodiments may be complementary to sequences in the close vicinity of the genomic coordinate listed in Table 5. For example, guide sequences of further embodiments may be complementary to sequences that comprise 15 consecutive nucleotides±10 nucleotides of a genomic coordinate listed in Table 5.

[0382] In some embodiments, the guide sequences may further comprise additional nucleotides to form a sgRNA, e.g., with the following exemplary nucleotide sequence following the 3′ end of the guide sequence: GUUUUAGAGCUAGAAAUAGCAAGUUAAAAUAAGGCUAGUCCGUUAUCAACUU GAAAAAGUGGCACCGAGUCGGUGCUUUU (SEQ ID NO: 227) in 5′ to 3′ orientation. The guide sequences may further comprise additional nucleotides to form a sgRNA.

[0383] In some embodiments, the sgRNA comprises the modification pattern shown below in SEQ ID NO: 141, where N is any natural or non-natural nucleotide, and where the totality of the N's comprise a guide sequence as described herein and the modified sgRNA comprises the following sequence: mN*mN*m*NNNNNNNNNNNNNNGUUUUAGAmGmCmUmAmGmAmAmAmU mAmGmCAAGUUAAAAUAAGGCUAGUCCGUUAUCAmAmCmUmUmGmAmAmAm AmAmGmUmGmGmCmAmCmCmGmAmGmUmCmGmGmUmGmCmU*mU*mU*mU (SEQ ID NO: 228), where “N” may be any natural or non-natural nucleotide. For example, encompassed herein is SEQ ID NO: 228, where the N's are replaced with any of the guide sequences disclosed herein. The modifications remain as shown in SEQ ID NO: 141 despite the substitution of N's for the nucleotides of a guide. That is, although the nucleotides of the guide replace the “N's”, the first three nucleotides are 2′OMe modified and there are phosphorothioate linkages between the first and second nucleotides, the second and third nucleotides and the third and fourth nucleotides.

[0384] In some embodiments, the gRNA targeting TRAC comprises a guide sequence chosen from: i) SEQ ID NOs: 251-264; ii) at least 17, 18, 19, or 20 contiguous nucleotides of a sequence selected from SEQ ID NOs: 251-264; iii) a guide sequence at least 95%, 90%, or 85% identical to a sequence selected from SEQ ID NOs: 251-264; iv) a sequence that comprises 10 contiguous nucleotides±10 nucleotides of a genomic coordinate listed in Table 5; v) at least 17, 18, 19, or 20 contiguous nucleotides of a sequence from (iv); or vi) a guide sequence that is at least 95%, 90%, or 85% identical to a sequence selected from (v).

[0385] In some embodiments, the guide sequence comprises SEQ ID NO: 251. In some embodiments, the guide sequence comprises SEQ ID NO: 252. In some embodiments, the guide sequence comprises SEQ ID NO: 253. In some embodiments, the guide sequence comprises SEQ ID NO: 254. In some embodiments, the guide sequence comprises SEQ ID NO: 255. In some embodiments, the guide sequence comprises SEQ ID NO: 256. In some embodiments, the guide sequence comprises SEQ ID NO: 257. In some embodiments, the guide sequence comprises SEQ ID NO: 258. In some embodiments, the guide sequence comprises SEQ ID NO: 259. In some embodiments, the guide sequence comprises SEQ ID NO: 260. In some embodiments, the guide sequence comprises SEQ ID NO: 261. In some embodiments, the guide sequence comprises SEQ ID NO: 262. In some embodiments, the guide sequence comprises SEQ ID NO: 263. In some embodiments, the guide sequence comprises SEQ ID NO: 264. In some embodiments, the guide sequence comprises SEQ ID NO: 265. In some embodiments, the guide sequence comprises SEQ ID NO: 266. In some embodiments, the guide sequence comprises SEQ ID NO: 267. In some embodiments, the guide sequence comprises SEQ ID NO: 268. In some embodiments, the guide sequence comprises SEQ ID NO: 269. In some embodiments, the guide sequence comprises SEQ ID NO: 270. In some embodiments, the guide sequence comprises SEQ ID NO: 271. In some embodiments, the guide sequence comprises SEQ ID NO: 272. In some embodiments, the guide sequence comprises SEQ ID NO: 273. In some embodiments, the guide sequence comprises SEQ ID NO: 274. In some embodiments, the guide sequence comprises SEQ ID NO: 275. In some embodiments, the guide sequence comprises SEQ ID NO: 276. In some embodiments, the guide sequence comprises SEQ ID NO: 277. In some embodiments, the guide sequence comprises SEQ ID NO: 278. In some embodiments, the guide sequence comprises SEQ ID NO: 279. In some embodiments, the guide sequence comprises SEQ ID NO: 280. In some embodiments, the guide sequence comprises SEQ ID NO: 281. In some embodiments, the guide sequence comprises SEQ ID NO: 282. In some embodiments, the guide sequence comprises SEQ ID NO: 283. In some embodiments, the guide sequence comprises SEQ ID NO: 284. In some embodiments, the guide sequence comprises SEQ ID NO: 285. In some embodiments, the guide sequence comprises SEQ ID NO: 286. In some embodiments, the guide sequence comprises SEQ ID NO: 287. In some embodiments, the guide sequence comprises SEQ ID NO: 288. In some embodiments, the guide sequence comprises SEQ ID NO: 289. In some embodiments, the guide sequence comprises SEQ ID NO: 290. In some embodiments, the guide sequence comprises SEQ ID NO: 291. In some embodiments, the guide sequence comprises SEQ ID NO: 292.

TABLE 5
AAVS1 guide sequences, guide RNA sequences, and
chromosomal coordinates

| Guide | SEQ ID | | Exemplary | | |
|---|---|---|---|---|---|
| ID | NO to the | | Full Sequence | | Genomic |
| | Guide | Guide | (SEQ ID NOS: | Exemplary Mod Sequence | Coordinates |
| | Sequence | Sequence | 265-278) | (SEQ ID NOS: 279-292) | (hg38) |
| G000562 | 251 | CCAAUA | CCAAUAUCAGG | mC*mC*mA*AUAUCAGGA | chr19: |
| | | UCAGGA | AGACUAGGAGU | GACUAGGAGUUUUAGAm | 55115695- |
| | | GACUAG | UUUAGAGCUAG | GmCmUmAmGmAmAmAm | 55115715 |
| | | GA | AAAUAGCAAGU | UmAmGmCAAGUUAAAAU | |
| | | | UAAAAUAAGGC | AAGGCUAGUCCGUUAUC | |
| | | | UAGUCCGUUAU | AmAmCmUmUmGmAmAm | |
| | | | CAACUUGAAAA | AmAmAmGmUmGmGmCm | |
| | | | AGUGGCACCGA | AmCmCmGmAmGmUmCm | |
| | | | GUCGGUGCUUU | GmGmUmGmCmU*mU*mU | |
| | | | U | *mU | |
| G013515 | 252 | CCAUCG | CCAUCGUAAGC | mC*mC*mA*UCGUAAGCA | chr19: |
| | | UAAGCA | AAACCUUAGGU | AACCUUAGGUUUUAGAm | 55115588- |
| | | AACCUU | UUUAGAGCUAG | GmCmUmAmGmAmAmAm | 55115608 |
| | | AG | AAAUAGCAAGU | UmAmGmCAAGUUAAAAU | |
| | | | UAAAAUAAGGC | AAGGCUAGUCCGUUAUC | |
| | | | UAGUCCGUUAU | AmAmCmUmUmGmAmAm | |
| | | | CAACUUGAAAA | AmAmAmGmUmGmGmCm | |
| | | | AGUGGCACCGA | AmCmCmGmAmGmUmCm | |
| | | | GUCGGUGCUUU | GmGmUmGmCmU*mU*mU | |
| | | | U | *mU | |
| G013519 | 253 | GCAAGG | GCAAGGAGAGA | mG*mC*mA*AGGAGAGA | chr19: |
| | | AGAGA | GAUGGCUCCGU | GAUGGCUCCGUUUUAGA | 55115616- |
| | | GAUGGC | UUUAGAGCUAG | mGmCmUmAmGmAmAmA | 55115636 |
| | | UCC | AAAUAGCAAGU | mUmAmGmCAAGUUAAA | |
| | | | UAAAAUAAGGC | AUAAGGCUAGUCCGUUA | |
| | | | UAGUCCGUUAU | UCAmAmCmUmUmGmAm | |
| | | | CAACUUGAAAA | AmAmAmAmGmUmGmGm | |
| | | | AGUGGCACCGA | CmAmCmCmGmAmGmUm | |
| | | | GUCGGUGCUUU | CmGmGmUmGmCmU*mU* | |
| | | | U | mU*mU | |
| G013520 | 254 | GAGAG | GAGAGAUGGCU | mG*mA*mG*AGAUGGCUC | chr19: |
| | | AUGGCU | CCAGGAAAUGU | CAGGAAAUGUUUUAGAm | 55115623- |
| | | CCAGGA | UUUAGAGCUAG | GmCmUmAmGmAmAmAm | 55115643 |
| | | AAU | AAAUAGCAAGU | UmAmGmCAAGUUAAAAU | |
| | | | UAAAAUAAGGC | AAGGCUAGUCCGUUAUC | |
| | | | UAGUCCGUUAU | AmAmCmUmUmGmAmAm | |
| | | | CAACUUGAAAA | AmAmAmGmUmGmGmCm | |
| | | | AGUGGCACCGA | AmCmCmGmAmGmUmCm | |
| | | | GUCGGUGCUUU | GmGmUmGmCmU*mU*mU | |
| | | | U | *mU | |
| G013523 | 255 | GGUGAC | GGUGACACACC | mG*mG*mU*GACACACCC | chr19: |
| | | ACACCC | CCCAUUUCCGU | CCAUUUCCGUUUUAGAm | 55115637- |
| | | CCAUUU | UUUAGAGCUAG | GmCmUmAmGmAmAmAm | 55115657 |
| | | CC | AAAUAGCAAGU | UmAmGmCAAGUUAAAAU | |
| | | | UAAAAUAAGGC | AAGGCUAGUCCGUUAUC | |
| | | | UAGUCCGUUAU | AmAmCmUmUmGmAmAm | |
| | | | CAACUUGAAAA | AmAmAmGmUmGmGmCm | |
| | | | AGUGGCACCGA | AmCmCmGmAmGmUmCm | |
| | | | GUCGGUGCUUU | GmGmUmGmCmU*mU*mU | |
| | | | U | *mU | |
| G013533 | 256 | AGACCC | AGACCCAAUAU | mA*mG*mA*CCCAAUAUC | chr19: |
| | | AAUAUC | CAGGAGACUGU | AGGAGACUGUUUUAGAm | 55115691- |
| | | AGGAG | UUUAGAGCUAG | GmCmUmAmGmAmAmAm | 55115711 |
| | | ACU | AAAUAGCAAGU | UmAmGmCAAGUUAAAAU | |
| | | | UAAAAUAAGGC | AAGGCUAGUCCGUUAUC | |
| | | | UAGUCCGUUAU | AmAmCmUmUmGmAmAm | |
| | | | CAACUUGAAAA | AmAmAmGmUmGmGmCm | |
| | | | AGUGGCACCGA | AmCmCmGmAmGmUmCm | |
| | | | GUCGGUGCUUU | GmGmUmGmCmU*mU*mU | |
| | | | U | *mU | |
| G013543 | 257 | UGUCCC | UGUCCCUAGUG | mU*mG*mU*CCCUAGUGG | chr19: |
| | | UAGUG | GCCCCACUGGU | CCCCACUGGUUUUAGAm | 55115755- |
| | | GCCCCA | UUUAGAGCUAG | GmCmUmAmGmAmAmAm | 55115775 |
| | | CUG | AAAUAGCAAGU | UmAmGmCAAGUUAAAAU | |
| | | | UAAAAUAAGGC | AAGGCUAGUCCGUUAUC | |
| | | | UAGUCCGUUAU | AmAmCmUmUmGmAmAm | |
| | | | CAACUUGAAAA | AmAmAmGmUmGmGmCm | |
| | | | AGUGGCACCGA | AmCmCmGmAmGmUmCm | |
| | | | GUCGGUGCUUU | GmGmUmGmCmU*mU*mU | |
| | | | U | *mU | |
| G013559 | 258 | CCGGCC | CCGGCCCUGGG | mC*mC*mG*GCCCUGGGA | chr19: |
| | | CUGGGA | AAUAUAAGGGU | AUAUAAGGGUUUUAGAm | 55115823- |
| | | AUAUA | UUUAGAGCUAG | GmCmUmAmGmAmAmAm | 55115843 |
| | | AGG | AAAUAGCAAGU | UmAmGmCAAGUUAAAAU | |
| | | | UAAAAUAAGGC | AAGGCUAGUCCGUUAUC | |
| | | | UAGUCCGUUAU | AmAmCmUmUmGmAmAm | |
| | | | CAACUUGAAAA | AmAmAmGmUmGmGmCm | |
| | | | AGUGGCACCGA | AmCmCmGmAmGmUmCm | |
| | | | GUCGGUGCUUU | GmGmUmGmCmU*mU*mU | |
| | | | U | *mU | |
| G013562 | 259 | AAUAU | AAUAUAAGGUG | mA*mA*mU*AUAAGGUG | chr19: |
| | | AAGGU | GUCCCAGCUGU | GUCCCAGCUGUUUUAGA | 55115834- |
| | | GGUCCC | UUUAGAGCUAG | mGmCmUmAmGmAmAmA | 55115854 |
| | | AGCU | AAAUAGCAAGU | mUmAmGmCAAGUUAAA | |
| | | | UAAAAUAAGGC | AUAAGGCUAGUCCGUUA | |
| | | | UAGUCCGUUAU | UCAmAmCmUmUmGmAm | |
| | | | CAACUUGAAAA | AmAmAmAmGmUmGmGm | |
| | | | AGUGGCACCGA | CmAmCmCmGmAmGmUm | |
| | | | GUCGGUGCUUU | CmGmGmUmGmCmU*mU* | |
| | | | U | mU*mU | |
| G013563 | 260 | AUAUA | AUAUAAGGUGG | mA*mU*mA*UAAGGUGG | chr19: |
| | | AGGUG | UCCCAGCUCGU | UCCCAGCUCGUUUUAGA | 55115835- |
| | | GUCCCA | UUUAGAGCUAG | mGmCmUmAmGmAmAmA | 55115855 |
| | | GCUC | AAAUAGCAAGU | mUmAmGmCAAGUUAAA | |
| | | | UAAAAUAAGGC | AUAAGGCUAGUCCGUUA | |
| | | | UAGUCCGUUAU | UCAmAmCmUmUmGmAm | |
| | | | CAACUUGAAAA | AmAmAmAmGmUmGmGm | |
| | | | AGUGGCACCGA | CmAmCmCmGmAmGmUm | |
| | | | GUCGGUGCUUU | CmGmGmUmGmCmU*mU* | |
| | | | U | mU*mU | |
| G013564 | 261 | UAUAA | UAUAAGGUGGU | mU*mA*mU*AAGGUGGU | chr19: |
| | | GGUGG | CCCAGCUCGGU | CCCAGCUCGGUUUUAGA | 55115836- |
| | | UCCCAG | UUUAGAGCUAG | mGmCmUmAmGmAmAmA | 55115856 |
| | | CUCG | AAAUAGCAAGU | mUmAmGmCAAGUUAAA | |
| | | | UAAAAUAAGGC | AUAAGGCUAGUCCGUUA | |
| | | | UAGUCCGUUAU | UCAmAmCmUmUmGmAm | |
| | | | CAACUUGAAAA | AmAmAmAmGmUmGmGm | |
| | | | AGUGGCACCGA | CmAmCmCmGmAmGmUm | |
| | | | GUCGGUGCUUU | CmGmGmUmGmCmU*mU* | |
| | | | U | mU*mU | |
| G013565 | 262 | GGAUCC | GGAUCCUGUGU | mG*mG*mA*UCCUGUGUC | chr19: |
| | | UGUGUC | CCCCGAGCUGU | CCCGAGCUGUUUUAGAm | 55115850- |
| | | CCCGAG | UUUAGAGCUAG | GmCmUmAmGmAmAmAm | 55115870 |
| | | CU | AAAUAGCAAGU | UmAmGmCAAGUUAAAAU | |
| | | | UAAAAUAAGGC | AAGGCUAGUCCGUUAUC | |
| | | | UAGUCCGUUAU | AmAmCmUmUmGmAmAm | |
| | | | CAACUUGAAAA | AmAmAmGmUmGmGmCm | |
| | | | AGUGGCACCGA | AmCmCmGmAmGmUmCm | |
| | | | GUCGGUGCUUU | GmGmUmGmCmU*mU*mU | |
| | | | U | *mU | |
| G013582 | 263 | CCUGUC | CCUGUCAUGGC | mC*mC*mU*GUCAUGGCA | chr19: |
| | | AUGGCA | AUCUUCCAGGU | UCUUCCAGGUUUUAGAm | 55115951- |
| | | UCUUCC | UUUAGAGCUAG | GmCmUmAmGmAmAmAm | 55115971 |
| | | AG | AAAUAGCAAGU | UmAmGmCAAGUUAAAAU | |
| | | | UAAAAUAAGGC | AAGGCUAGUCCGUUAUC | |
| | | | UAGUCCGUUAU | AmAmCmUmUmGmAmAm | |
| | | | CAACUUGAAAA | AmAmAmGmUmGmGmCm | |
| | | | AGUGGCACCGA | AmCmCmGmAmGmUmCm | |
| | | | GUCGGUGCUUU | GmGmUmGmCmU*mU*mU | |
| | | | U | *mU | |
| G013584 | 264 | CCCUGG | CCCUGGAAGAU | mC*mC*mC*UGGAAGAUG | chr19: |
| | | AAGAU | GCCAUGACAGU | CCAUGACAGUUUUAGAm | 55115949- |
| | | GCCAUG | UUUAGAGCUAG | GmCmUmAmGmAmAmAm | 55115969 |
| | | ACA | AAAUAGCAAGU | UmAmGmCAAGUUAAAAU | |
| | | | UAAAAUAAGGC | AAGGCUAGUCCGUUAUC | |
| | | | UAGUCCGUUAU | AmAmCmUmUmGmAmAm | |
| | | | CAACUUGAAAA | AmAmAmGmUmGmGmCm | |
| | | | AGUGGCACCGA | AmCmCmGmAmGmUmCm | |
| | | | GUCGGUGCUUU | GmGmUmGmCmU*mU*mU | |
| | | | U | *mU | |

[0386] As used herein, the terms “mA,” “mC,” “mU,” or “mG” denote a nucleotide that has been modified with 2′-O-Me; “*” denote a PS modification; the terms A*, C*, U*, or G* denote a nucleotide that is linked to the next (e.g., 3′) nucleotide with a PS bond.

[0387] In some embodiments, provided herein is a composition comprising: a. a gRNA comprising a guide sequence chosen from: i) SEQ ID NOs: 251-264; ii) at least 17, 18, 19, or 20 contiguous nucleotides of a sequence selected from SEQ ID NOs: 251-264; iii) a guide sequence at least 95%, 90%, or 85% identical to a sequence selected from SEQ ID NOs: 251-264; iv) a sequence that comprises 10 contiguous nucleotides±10 nucleotides of a genomic coordinate listed in Table 5; v) at least 17, 18, 19, or 20 contiguous nucleotides of a sequence from (iv); or vi) a guide sequence that is at least 95%, 90%, or 85% identical to a sequence selected from (v); or b. a nucleic acid encoding a gRNA of (a.).

[0388] In some embodiments, provided herein is a method of altering a DNA sequence within an AAVS1 gene, comprising delivering to a cell: a. a gRNA comprising a guide sequence chosen from: i) SEQ ID NOs: 251-264; ii) at least 17, 18, 19, or 20 contiguous nucleotides of a sequence selected from SEQ ID NOs: 251-264; iii) a guide sequence at least 95%, 90%, or 85% identical to a sequence selected from SEQ ID NOs: 251-264; iv) a sequence that comprises 10 contiguous nucleotides±10 nucleotides of a genomic coordinate listed in Table 5; v) at least 17, 18, 19, or 20 contiguous nucleotides of a sequence from (iv); or vi) a guide sequence that is at least 95%, 90%, or 85% identical to a sequence selected from (v); or b. a nucleic acid encoding a gRNA of (a.).

[0389] In some embodiments, provided herein is method of immunotherapy comprising administering a composition comprising an engineered cell to a subject, wherein the cell comprises a genomic modification in the AAVS1 gene, wherein the genetic modification comprises an insertion within the genomic coordinates selected from: chr19:55115695-55115715; chr19:55115588-55115608; chr19:55115616-55115636; chr19:55115623-55115643; chr19:55115637-55115657; chr19:55115691-55115711; chr19:55115755-55115775; chr19:55115823-55115843; chr19:55115834-55115854; chr19:55115835-55115855; chr19:55115836-55115856; chr19:55115850-55115870; chr19:55115951-55115971; and chr19:55115949-55115969; or wherein the cell is engineered by delivering to the cell: a. a gRNA comprising a guide sequence chosen from: i) SEQ ID NOs: 251-264; ii) at least 17, 18, 19, or 20 contiguous nucleotides of a sequence selected from SEQ ID NOs: 251-264; iii) a guide sequence at least 95%, 90%, or 85% identical to a sequence selected from SEQ ID NOs: 251-264; iv) a sequence that comprises 10 contiguous nucleotides±10 nucleotides of a genomic coordinate listed in Table 5; v) at least 17, 18, 19, or 20 contiguous nucleotides of a sequence from (iv); or vi) a guide sequence that is at least 95%, 90%, or 85% identical to a sequence selected from (v); or b. a nucleic acid encoding a gRNA of (a.).

[0390] In some embodiments, provided herein is an engineered cell comprising a genetic modification in the AAVS1 gene, wherein the genetic modification comprises an insertion within the genomic coordinates chosen from: chr19:55115695-55115715; chr19:55115588-55115608; chr19:55115616-55115636; chr19:55115623-55115643; chr19:55115637-55115657; chr19:55115691-55115711; chr19:55115755-55115775; chr19:55115823-55115843; chr19:55115834-55115854; chr19:55115835-55115855; chr19:55115836-55115856; chr19:55115850-55115870; chr19:55115951-55115971; and chr19:55115949-55115969.

### D. Donor Nucleic Acid

[0391] The compositions and methods disclosed herein may include a donor nucleic acid, i.e., a template nucleic acid, encoding an exogenous gene. The donor/template nucleic acid may be used to alter or insert the exogenous gene at or near a target site for a Cas nuclease, such as at a genetic locus. In some embodiments, the methods comprise introducing a template to the cell. In some embodiments, a single template may be provided.

[0392] In other embodiments, two or more templates may be provided such that editing may occur at two or more target sites. For example, different templates may be provided to edit a single gene in a cell, or two different genes in a cell. In some embodiments, the compositions and methods disclosed herein include a template nucleic acid encoding an exogenous gene for insertion into the TRAC, AAVS1, or CIITA locus.

[0393] In some embodiments, the template may be used in homologous recombination. In some embodiments, the homologous recombination may result in the integration of the template sequence or a portion of the template sequence into a target sequence. In other embodiments, the template may be used in homology-directed repair, which involves DNA strand invasion at the site of the cleavage in a target sequence. In some embodiments, the homology-directed repair may result in including the template sequence in an edited target sequence. In yet other embodiments, the template may be used in gene editing mediated by non-homologous end joining. In some embodiments, the template sequence has no similarity to a target sequence near the cleavage site. In some embodiments, the template or a portion of the template sequence is incorporated. In some embodiments, the template includes flanking inverted terminal repeat (ITR) sequences.

[0394] In some embodiments, the template may comprise a first homology arm and a second homology arm (also called a first and second nucleotide sequence) that are complementary to sequences located upstream and downstream of the cleavage site, respectively. Where a template contains two homology arms, each arm can be the same length or different lengths, and the sequence between the homology arms can be substantially similar or identical to the target sequence between the homology arms, or it can be entirely unrelated. In some embodiments, the degree of complementarity or percent identity between a first nucleotide sequence on the template and the sequence upstream of the cleavage site, and between a second nucleotide sequence on the template and the sequence downstream of the cleavage site, may permit homologous recombination, such as, e.g., high-fidelity homologous recombination, between the template and the target nucleic acid molecule. In some embodiments, the degree of complementarity may be about 50%, 55%, 60%, 65%, 70%, 75%, 80%, 85%, 90%, 95%, 97%, 98%, 99%, or 100%. In some embodiments, the degree of complementarity may be about 95%, 97%, 98%, 99%, or 100%. In some embodiments, the degree of complementarity may be at least 98%, 99%, or 100%. In some embodiments, the degree of complementarity may be 100%. In some embodiments, the percent identity may be about 50%, 55%, 60%, 65%, 70%, 75%, 80%, 85%, 90%, 95%, 97%, 98%, 99%, or 100%. In some embodiments, the percent identity may be about 95%, 97%, 98%, 99%, or 100%. In some embodiments, the percent identity may be at least 98%, 99%, or 100%. In some embodiments, the percent identity may be 100%.

[0395] In some embodiments, the template sequence may correspond to, comprise, or consist of an endogenous sequence of a target cell. It may also or alternatively correspond to, comprise, or consist of an exogenous sequence of a target cell. As used herein, the term “endogenous sequence” refers to a sequence that is native to the cell. The term “exogenous sequence” refers to a sequence that is not native to a cell, or a sequence whose native location in the genome of the cell is in a different location. In some embodiments, the endogenous sequence may be a genomic sequence of the cell. In some embodiments, the endogenous sequence may be a chromosomal or extrachromosomal sequence. In some embodiments, the endogenous sequence may be a plasmid sequence of the cell. In some embodiments, the template sequence may be substantially identical to a portion of the endogenous sequence in a cell at or near the cleavage site, but comprise at least one nucleotide change. In some embodiments, editing the cleaved target sequence with the template may result in a mutation comprising an insertion, deletion, or substitution of one or more nucleotides of the target sequence. In some embodiments, the mutation may result in one or more amino acid changes in a protein expressed from a gene comprising the target sequence.

[0396] In some embodiments, the mutation may result in one or more nucleotide changes in an RNA expressed from the target insertion site. In some embodiments, the mutation may alter the expression level of a target gene. In some embodiments, the mutation may result in increased or decreased expression of the target gene. In some embodiments, the mutation may result in gene knock-down. In some embodiments, the mutation may result in gene knock-out. In some embodiments, the mutation may result in restored gene function. In some embodiments, editing of the cleaved target nucleic acid molecule with the template may result in a change in an exon sequence, an intron sequence, a regulatory sequence, a transcriptional control sequence, a translational control sequence, a splicing site, or a non-coding sequence of the target nucleic acid molecule, such as DNA.

[0397] In other embodiments, the template sequence may comprise an exogenous sequence. In some embodiments, the exogenous sequence may comprise a coding sequence. In some embodiments, the exogenous sequence may comprise a protein or RNA coding sequence (e.g., an ORF) operably linked to an exogenous promoter sequence such that, upon integration of the exogenous sequence into the target sequence, the cell is capable of expressing the protein or RNA encoded by the integrated sequence. In other embodiments, upon integration of the exogenous sequence into the target nucleic acid molecule, the expression of the integrated sequence may be regulated by an endogenous promoter sequence. In some embodiments, the exogenous sequence may provide a cDNA sequence encoding a protein or a portion of the protein. In yet other embodiments, the exogenous sequence may comprise or consist of an exon sequence, an intron sequence, a regulatory sequence, a transcriptional control sequence, a translational control sequence, a splicing site, or a non-coding sequence. In some embodiments, the integration of the exogenous sequence may result in restored gene function. In some embodiments, the integration of the exogenous sequence may result in a gene knock-in. In some embodiments, the integration of the exogenous sequence may result in a gene knock-out.

[0398] The template may be of any suitable length. In some embodiments, the template may comprise 10, 15, 20, 25, 50, 75, 100, 150, 200, 500, 1000, 1500, 2000, 2500, 3000, 3500, 4000, 4500, 5000, 5500, 6000, or more nucleotides in length. The template may be a single-stranded nucleic acid. The template can be double-stranded or partially double-stranded nucleic acid. In some embodiments, the single stranded template is 20, 30, 40, 50, 75, 100, 125, 150, 175, or 200 nucleotides in length. In some embodiments, the template may comprise a nucleotide sequence that is complementary to a portion of the target sequence comprising the target sequence (i.e., a “homology arm”). In some embodiments, the template may comprise a homology arm that is complementary to the sequence located upstream or downstream of the cleavage site on the target sequence.

[0399] In some embodiments, the template contains ssDNA or dsDNA containing flanking invert-terminal repeat (ITR) sequences. In some embodiments, the template is provided as a vector, plasmid, minicircle, nanocircle, or PCR product.

### VII. LIPID NUCLEIC ACID ASSEMBLIES

[0400] The following section provides additional features of lipid-based delivery compositions, including lipid nanoparticles (LNPs) and lipoplexes, for the first genome editing tool, the second genome editing tool, or a nucleic acid encoding the same. In some embodiments, the first genome editing tool, the second genome editing tool, or a nucleic acid encoding the same is delivered to the cell via at least one lipid nanoparticle (LNP). In some embodiments, the first genome editing tool, the second genome editing tool, or a nucleic acid encoding the same is contained in at least one LNP.

[0401] In some embodiments, LNP refers to lipid nanoparticles with a diameter of <100 nm, or a population of LNP with an average diameter of <100 nm, as measured by dynamic light scattering. In some embodiments, the particle size is a number average. In some embodiments, the particle size is a Z-average. In certain embodiments, an LNP has a diameter of about 1-250 nm, 10-200 nm, about 20-150 nm, about 35-150 nm, about 50-150 nm, about 50-100 nm, about 50-120 nm, about 60-100 nm, about 75-150 nm, about 75-120 nm, or about 75-100 nm, or a population of the LNP with an average diameter, as measured by dynamic light scattering, of about 10-200 nm, about 20-150 nm, about 35-150 nm, about 50-150 nm, about 50-100 nm, about 50-120 nm, about 60-100 nm, about 75-150 nm, about 75-120 nm, or about 75-100 nm. In preferred embodiments, an LNP composition has a diameter of 75-150 nm.

[0402] LNPs are formed by precise mixing a lipid component (e.g., in ethanol) with an aqueous nucleic acid component and LNPs are uniform in size. Lipoplexes are particles formed by bulk mixing the lipid and nucleic acid components and are between about 100 nm and 1 micron in size. In certain embodiments the lipid nucleic acid assemblies are LNPs. As used herein, a “lipid nucleic acid assembly” comprises a plurality of (i.e., more than one) lipid molecules physically associated with each other by intermolecular forces. A lipid nucleic acid assembly may comprise a bioavailable lipid having a pKa value of <7.5 or <7. The lipid nucleic acid assemblies are formed by mixing an aqueous nucleic acid-containing solution with an organic solvent-based lipid solution, e.g., 100% ethanol. Suitable solutions or solvents include or may contain: water, PBS, Tris buffer, NaCl, citrate buffer, ethanol, chloroform, diethylether, cyclohexane, tetrahydrofuran, methanol, isopropanol. A pharmaceutically acceptable buffer may optionally be comprised in a pharmaceutical formulation comprising the lipid nucleic acid assemblies, e.g., for an ex vivo ACT therapy. In some embodiments, the aqueous solution comprises an RNA, such as an mRNA or a gRNA. In some embodiments, the aqueous solution comprises an mRNA encoding an RNA-guided DNA binding agent, such as Cas9.

[0403] In some embodiments, the lipid nucleic acid assembly formulations include an “amine lipid” (sometimes herein or elsewhere described as an “ionizable lipid” or a “biodegradable lipid”), together with an optional “helper lipid”, a “neutral lipid”, and a stealth lipid such as a PEG lipid. In some embodiments, the amine lipids or ionizable lipids are cationic depending on the pH.

### A. Amine Lipids

[0404] In some embodiments, LNPs comprise an “amine lipid,” which is, for example an ionizable lipid such as Lipid A, or Lipid D or their equivalents, including acetal analogs of Lipid A or Lipid D.

[0405] In some embodiments, the amine lipid is Lipid A, which is (9Z,12Z)-3-((4,4-bis(octyloxy)butanoyl)oxy)-2-((((3-(diethylamino)propoxy)carbonyl)oxy)methyl)propyl octadeca-9,12-dienoate, also called 3-((4,4-bis(octyloxy)butanoyl)oxy)-2-((((3-(diethylamino)propoxy)carbonyl)oxy)methyl)propyl (9Z,12Z)-octadeca-9,12-dienoate. Lipid A can be depicted as:

[chemical structure]

[0406] Lipid A may be synthesized according to WO2015/095340 (e.g., pp. 84-86). In some embodiments, the amine lipid is Lipid A, or an amine lipid provided in WO2020/219876, which is hereby incorporated by reference.

[0407] In some embodiments, an amine lipid is an analog of Lipid A. In some embodiments, a Lipid A analog is an acetal analog of Lipid A. In particular LNPs, the acetal analog is a C4-C12 acetal analog. In some embodiments, the acetal analog is a C5-C12 acetal analog. In additional embodiments, the acetal analog is a C5-C10 acetal analog. In further embodiments, the acetal analog is chosen from a C4, C5, C6, C7, C9, C10, C11, and C12 acetal analog.

[0408] In some embodiments, the amine lipid is a compound having a structure of Formula IA

[chemical structure]

[0409] wherein
[0410] X1A is O, NH, or a direct bond;
[0411] X2A is C2-3 alkylene;
[0412] R3A is C1-3 alkyl;
[0413] R2A is C1-3 alkyl, or
[0414] R2A taken together with the nitrogen atom to which it is attached and 2-3 carbon atoms of X2A form a 5- or 6-membered ring, or
[0415] R2A taken together with R3A and the nitrogen atom to which they are attached form a 5-membered ring;
[0416] Y1A is C6-10 alkylene;
[0417] Y2A is selected from

[chemical structure]

[0418] R4A is C4-11 alkyl;
[0419] Z1A is C2-5 alkylene;
[0420] Z2A is

[chemical structure]

or absent;
[0421] R5A is C6-8 alkyl or C6-8 alkoxy; and
[0422] R6A is C6-8 alkyl or C6-8 alkoxy
[0423] or a salt thereof.

[0424] In some embodiments, the amine lipid is a compound of Formula (IIA)

[chemical structure]

[0425] wherein
[0426] X1A is O, NH, or a direct bond;
[0427] X2A is C2-3 alkylene;
[0428] Z1A is C3 alkylene and R5A and R6A are each C6 alkyl, or Z1A is a direct bond and R5A and R6A are each C8 alkoxy; and
[0429] R8A is

[chemical structure]

[0430] or a salt thereof.

[0431] In certain embodiments, X1A is O. In other embodiments, X1A is NH. In still other embodiments, X1A is a direct bond.

[0432] In certain embodiments, X2A is C3 alkylene. In particular embodiments, X2A is C2 alkylene.

[0433] In certain embodiments, Z1A is a direct bond and R5A and R6A are each C8 alkoxy. In other embodiments, Z1A is C3 alkylene and R5A and R6A are each C6 alkyl.

[0434] In certain embodiments, R8A is

[chemical structure]

In other embodiments, R8A is

[chemical structure]

[0435] In certain embodiments, the amine lipid is a salt.

[0436] Representative compounds of Formula (IA) include:

| Com- | |
|---|---|
| pound | |
| Num- | |
| ber | Compound |
| 1A | [chemical structure] |
| 2A | [chemical structure] |
| 3A | [chemical structure] |
| 4A | [chemical structure] |
| 5A | [chemical structure] |
| 6A | [chemical structure] |
| 7A | [chemical structure] |
| 8A | [chemical structure] |
| 9A | [chemical structure] |
| 10A | [chemical structure] |
| 11A | [chemical structure] |
| 12A | [chemical structure] |
| 13A | [chemical structure] |
| 14A | [chemical structure] |
| 15A | [chemical structure] |
| 16A | [chemical structure] |
| 17A | [chemical structure] |
| 18A | [chemical structure] |
| 19A | [chemical structure] |

or a salt thereof, such as a pharmaceutically acceptable salt thereof.

[0437] In some embodiments, the amine lipid is Lipid D, which is nonyl 8-((7,7-bis(octyloxy)heptyl)(2-hydroxyethyl)amino)octanoate:

[chemical structure]

or a salt thereof.

[0438] Lipid D may be synthesized according to WO2020072605 and Mol. Ther. 2018, 26(6), 1509-1519 (“Sabnis”), which are incorporated by reference in their entireties. In some embodiments, the amine lipid Lipid D, or an amine lipid provided in WO2020072605, which is hereby incorporated by reference.

[0439] In some embodiments, the amine lipid is a compound having a structure of Formula IB:

[chemical structure]

[0440] wherein
[0441] X^{1B} is C₆₋₇ alkylene;
[0442] X^{2B} is

[chemical structure]

or absent, provided that if X^{2B} is

[chemical structure]

R^{2B} is not alkoxy;
[0443] Z^{1B} is C₂₋₃ alkylene;
[0444] Z^{2B} is selected from —OH, —NHC(═O)OCH₃, and —NHS(═O)₂CH₃;
[0445] R^{1B} is C₇₋₉ unbranched alkyl; and
[0446] each R^{2B} is independently C₈ alkyl or C₈ alkoxy;
[0447] or a salt thereof

[0448] In some embodiments, the amine lipid is a compound of Formula (IIB)

[chemical structure]

[0449] wherein
[0450] X^{1B} is C₆₋₇ alkylene;
[0451] Z^{1B} is C₂₋₃ alkylene;
[0452] R^{1B} is C₇₋₉ unbranched alkyl; and
[0453] each R^{2B} is C₈ alkyl;
[0454] or a salt thereof.

[0455] In certain embodiments, X^{1B} is C6 alkylene. In other embodiments, X^{1B} is C₇ alkylene.

[0456] In certain embodiments, Z^{1B} is a direct bond and R^{5B} and R^{6B} are each C₈ alkoxy. In other embodiments, Z^{1B} is C₃ alkylene and R^{5B} and R^{6B} are each C₆ alkyl.

[0457] In certain embodiments, X^{2B} is

[chemical structure]

and R^{2B} is not alkoxy. In other embodiments, X^{2B} is absent.

[0458] In certain embodiments, Z^{1B} is C₂ alkylene; In other embodiments, Z^{1B} is C₃ alkylene.

[0459] In certain embodiments, Z^{2B} is —OH. In other embodiments, Z^{2B} is —NHC(═O)OCH₃. In other embodiments, Z^{2B} is —NHS(═O)₂CH₃.

[0460] In certain embodiments, R^{1B} is C₇ unbranched alkylene. In other embodiments, R^{1B} is C₈ branched or unbranched alkylene. In other embodiments, R^{1B} is C₉ branched or unbranched alkylene.

[0461] In certain embodiments, the amine lipid is a salt.

[0462] Representative compounds of Formula (IB) include:

| Compound | |
|---|---|
| Number | Compound |
| 1B | [chemical structure] |
| 2B | [chemical structure] |
| 3B | [chemical structure] |
| 4B | [chemical structure] |
| 5B | [chemical structure] |
| 6B | [chemical structure] |
| 7B | [chemical structure] |

or a salt thereof, such as a pharmaceutically acceptable salt thereof.

[0463] Amine lipids and other “biodegradable lipids” suitable for use in the lipid nucleic acid assemblies described herein are biodegradable in vivo or ex vivo. The amine lipids have low toxicity (e.g., are tolerated in animal models without adverse effect in amounts of greater than or equal to 10 mg/kg). In some embodiments, lipid nucleic acid assemblies comprising an amine lipid include those where at least 75% of the amine lipid is cleared from the plasma or the engineered cell within 8, 10, 12, 24, or 48 hours, or 3, 4, 5, 6, 7, or 10 days. In some embodiments, lipid nucleic acid assemblies comprising an amine lipid include those where at least 50% of the nucleic acid, e.g., mRNA or gRNA, is cleared from the plasma within 8, 10, 12, 24, or 48 hours, or 3, 4, 5, 6, 7, or 10 days. In some embodiments, lipid nucleic acid assemblies comprising an amine lipid include those where at least 50% of the lipid nucleic acid assembly is cleared from the plasma within 8, 10, 12, 24, or 48 hours, or 3, 4, 5, 6, 7, or 10 days, for example by measuring a lipid (e.g., an amine lipid), nucleic acid, e.g., RNA/mRNA, or other component. In some embodiments, lipid-encapsulated versus free lipid, RNA, or nucleic acid component of the lipid nucleic acid assembly is measured.

[0464] Biodegradable lipids include, for example the biodegradable lipids of WO 2020/219876 (e.g., at pp. 13-33, 66-87), WO 2020/118041, WO 2020/072605 (e.g., at pp. 5-12, 21-29, 61-68, WO 2019/067992, WO 2017/173054, WO 2015/095340, and WO 2014/136086, and LNPs include LNP compositions described therein, the lipids and compositions of which are hereby incorporated by reference.

[0465] Lipid clearance may be measured as described in literature. See Maier, M. A., et al. Biodegradable Lipids Enabling Rapidly Eliminated Lipid Nanoparticles for Systemic Delivery of RNAi Therapeutics. Mol. Ther. 2013, 21(8), 1570-78 (“Maier”). For example, in Maier, LNP-siRNA systems containing luciferases-targeting siRNA were administered to six- to eight-week old male C57Bl/6 mice at 0.3 mg/kg by intravenous bolus injection via the lateral tail vein. Blood, liver, and spleen samples were collected at 0.083, 0.25, 0.5, 1, 2, 4, 8, 24, 48, 96, and 168 hours post-dose. Mice were perfused with saline before tissue collection and blood samples were processed to obtain plasma. All samples were processed and analyzed by LC-MS. Further, Maier describes a procedure for assessing toxicity after administration of LNP-siRNA formulations. For example, a luciferase-targeting siRNA was administered at 0, 1, 3, 5, and 10 mg/kg (5 animals/group) via single intravenous bolus injection at a dose volume of 5 mL/kg to male Sprague-Dawley rats. After 24 hours, about 1 mL of blood was obtained from the jugular vein of conscious animals and the serum was isolated. At 72 hours post-dose, all animals were euthanized for necropsy. Assessments of clinical signs, body weight, serum chemistry, organ weights and histopathology were performed. Although Maier describes methods for assessing siRNA-LNP formulations, these methods may be applied to assess clearance, pharmacokinetics, and toxicity of administration of LNPs of the present disclosure.

[0466] Ionizable and bioavailable lipids for LNP delivery of nucleic acids known in the art are suitable. Lipids may be ionizable depending upon the pH of the medium they are in. For example, in a slightly acidic medium, the lipid, such as an amine lipid, may be protonated and thus bear a positive charge. Conversely, in a slightly basic medium, such as, for example, blood where pH is approximately 7.35, the lipid, such as an amine lipid, may not be protonated and thus bear no charge.

[0467] The ability of a lipid to bear a charge is related to its intrinsic pKa. In some embodiments, the amine lipids of the present disclosure may each, independently, have a pKa in the range of from about 5.1 to about 7.4. In some embodiments, the bioavailable lipids of the present disclosure may each, independently, have a pKa in the range of from about 5.1 to about 7.4, such as from about 5.5 to about 6.6, from about 5.6 to about 6.4, from about 5.8 to about 6.2, or from about 5.8 to about 6.5. For example, the amine lipids of the present disclosure may each, independently, have a pKa in the range of from about 5.8 to about 6.5. Lipids with a pKa ranging from about 5.1 to about 7.4 are effective for delivery of cargo in vivo, e.g. to the liver. Further, it has been found that lipids with a pKa ranging from about 5.3 to about 6.4 are effective for delivery in vivo, e.g. to tumors. See, e.g., WO2014/136086.

### B. Additional Lipids

[0468] “Neutral lipids” suitable for use in a lipid composition of the disclosure include, for example, a variety of neutral, uncharged or zwitterionic lipids. Examples of neutral phospholipids suitable for use in the present disclosure include, but are not limited to, 5-heptadecylbenzene-1,3-diol (resorcinol), dipalmitoylphosphatidylcholine (DPPC), distearoylphosphatidylcholine (DSPC), pohsphocholine (DOPC), dimyristoylphosphatidylcholine (DMPC), phosphatidylcholine (PLPC), 1,2-distearoyl-sn-glycero-3-phosphocholine (DAPC), phosphatidylethanolamine (PE), egg phosphatidylcholine (EPC), dilauryloylphosphatidylcholine (DLPC), dimyristoylphosphatidylcholine (DMPC), 1-myristoyl-2-palmitoyl phosphatidylcholine (MPPC), 1-palmitoyl-2-myristoyl phosphatidylcholine (PMPC), 1-palmitoyl-2-stearoyl phosphatidylcholine (PSPC), 1,2-diarachidoyl-sn-glycero-3-phosphocholine (DBPC), 1-stearoyl-2-palmitoyl phosphatidylcholine (SPPC), 1,2-dieicosenoyl-sn-glycero-3-phosphocholine (DEPC), palmitoyloleoyl phosphatidylcholine (POPC), lysophosphatidyl choline, dioleoyl phosphatidylethanolamine (DOPE), dilinoleoylphosphatidylcholine distearoylphosphatidylethanolamine (DSPE), dimyristoyl phosphatidylethanolamine (DMPE), dipalmitoyl phosphatidylethanolamine (DPPE), palmitoyloleoyl phosphatidylethanolamine (POPE), lysophosphatidylethanolamine and combinations thereof. In one embodiment, the neutral phospholipid may be selected from the group consisting of distearoylphosphatidylcholine (DSPC) and dimyristoyl phosphatidyl ethanolamine (DMPE). In another embodiment, the neutral phospholipid may be distearoylphosphatidylcholine (DSPC).

[0469] “Helper lipids” include steroids, sterols, and alkyl resorcinols. Helper lipids suitable for use in the present disclosure include, but are not limited to, cholesterol, 5-heptadecylresorcinol, and cholesterol hemisuccinate. In one embodiment, the helper lipid may be cholesterol. In one embodiment, the helper lipid may be cholesterol hemisuccinate.

[0470] “Stealth lipids” are lipids that alter the length of time the nanoparticles can exist in vivo (e.g., in the blood). Stealth lipids may assist in the formulation process by, for example, reducing particle aggregation and controlling particle size. Stealth lipids used herein may modulate pharmacokinetic properties of the lipid nucleic acid assembly or aid in stability of the nanoparticle ex vivo. Stealth lipids suitable for use in a lipid composition of the disclosure include, but are not limited to, stealth lipids having a hydrophilic head group linked to a lipid moiety. Stealth lipids suitable for use in a lipid composition of the present disclosure and information about the biochemistry of such lipids can be found in Romberg et al., Pharmaceutical Research, Vol. 25, No. 1, 2008, pg. 55-71 and Hoekstra et al., Biochimica et Biophysica Acta 1660 (2004) 41-52. Additional suitable PEG lipids are disclosed, e.g., in WO 2006/007712.

[0471] In one embodiment, the hydrophilic head group of stealth lipid comprises a polymer moiety selected from polymers based on PEG. Stealth lipids may comprise a lipid moiety. In some embodiments, the stealth lipid is a PEG lipid.

[0472] In one embodiment, a stealth lipid comprises a polymer moiety selected from polymers based on PEG (sometimes referred to as poly(ethylene oxide)), poly(oxazoline), poly(vinyl alcohol), poly(glycerol), poly(N-vinylpyrrolidone), polyaminoacids and poly[N-(2-hydroxypropyl)methacrylamide].

[0473] In one embodiment, the PEG lipid comprises a polymer moiety based on PEG (sometimes referred to as poly(ethylene oxide)).

[0474] The PEG lipid further comprises a lipid moiety. In some embodiments, the lipid moiety may be derived from diacylglycerol or diacylglycamide, including those comprising a dialkylglycerol or dialkylglycamide group having alkyl chain length independently comprising from about C4 to about C40 saturated or unsaturated carbon atoms, wherein the chain may comprise one or more functional groups such as, for example, an amide or ester. In some embodiments, the alkyl chain length comprises about C10 to C20. The dialkylglycerol or dialkylglycamide group can further comprise one or more substituted alkyl groups. The chain lengths may be symmetrical or asymmetrical.

[0475] Unless otherwise indicated, the term “PEG” as used herein means any polyethylene glycol or other polyalkylene ether polymer. In one embodiment, PEG is an optionally substituted linear or branched polymer of ethylene glycol or ethylene oxide. In one embodiment, PEG is unsubstituted. In one embodiment, the PEG is substituted, e.g., by one or more alkyl, alkoxy, acyl, hydroxy, or aryl groups. In one embodiment, the term includes PEG copolymers such as PEG-polyurethane or PEG-polypropylene (see, e.g., J. Milton Harris, Poly(ethylene glycol) chemistry: biotechnical and biomedical applications (1992)); in another embodiment, the term does not include PEG copolymers. In one embodiment, the PEG has a molecular weight of from about 130 to about 50,000, in a sub-embodiment, about 150 to about 30,000, in a sub-embodiment, about 150 to about 20,000, in a sub-embodiment about 150 to about 15,000, in a sub-embodiment, about 150 to about 10,000, in a sub-embodiment, about 150 to about 6,000, in a sub-embodiment, about 150 to about 5,000, in a sub-embodiment, about 150 to about 4,000, in a sub-embodiment, about 150 to about 3,000, in a sub-embodiment, about 300 to about 3,000, in a sub-embodiment, about 1,000 to about 3,000, and in a sub-embodiment, about 1,500 to about 2,500.

[0476] In some embodiments, the PEG (e.g., conjugated to a lipid moiety or lipid, such as a stealth lipid), is a “PEG-2K,” also termed “PEG 2000,” which has an average molecular weight of about 2,000 Daltons. PEG-2K is represented herein by the following formula (IV), wherein n is 45, meaning that the number averaged degree of polymerization comprises about 45 subunits

[chemical structure]

However, other PEG embodiments known in the art may be used, including, e.g., those where the number-averaged degree of polymerization comprises about 23 subunits (n=23), or 68 subunits (n=68). In some embodiments, n may range from about 30 to about 60. In some embodiments, n may range from about 35 to about 55. In some embodiments, n may range from about 40 to about 50. In some embodiments, n may range from about 42 to about 48. In some embodiments, n may be 45. In some embodiments, R may be selected from H, substituted alkyl, and unsubstituted alkyl. In some embodiments, R may be unsubstituted alkyl. In some embodiments, R may be methyl.

[0477] In any of the embodiments described herein, the PEG lipid may be selected from PEG-dilauroylglycerol, PEG-dimyristoylglycerol (PEG-DMG catalog #GM-020 from NOF, Tokyo, Japan), such as e.g., 1,2-dimyristoyl-rac-glycero-3-methylpolyoxyethylene glycol 2000 (PEG2k-DMG), PEG-dipalmitoylglycerol, PEG-distearoylglycerol (PEG-DSPE) (catalog #DSPE-020CN, NOF, Tokyo, Japan), PEG-dilaurylglycamide, PEG-dimyristylglycamide, PEG-dipalmitoylglycamide, and PEG-distearoylglycamide, PEG-cholesterol (1-[8′-(Cholest-5-en-3[beta]-oxy)carboxamido-3′,6′-dioxaoctanyl]carbamoyl-[omega]-methyl-poly(ethylene glycol), PEG-DMB (3,4-ditetradecoxylbenzyl-[omega]-methyl-poly(ethylene glycol)ether), 1,2-dimyristoyl-sn-glycero-3-phosphoethanolamine-N-[methoxy(polyethylene glycol)-2000](PEG2k-DMPE) (cat. #880150P from Avanti Polar Lipids, Alabaster, Alabama, USA), 1,2-distearoyl-sn-glycero-3-phosphoethanolamine-N-[methoxy(polyethylene glycol)-2000](PEG2k-DSPE) (cat. #880120C from Avanti Polar Lipids, Alabaster, Alabama, USA), 1,2-distearoyl-sn-glycerol, methoxypolyethylene glycol (PEG2k-DSG; GS-020, NOF Tokyo, Japan), poly(ethylene glycol)-2000-dimethacrylate (PEG2k-DMA), and 1,2-distearyloxypropyl-3-amine-N-[methoxy(polyethylene glycol)-(PEG2k-DSA). In one embodiment, the PEG lipid may be 1,2-dimyristoyl-rac-glycero-3-methylpolyoxyethylene glycol 2000. In one embodiment, the PEG lipid may be PEG2k-DMG. In some embodiments, the PEG lipid may be PEG2k-DSG. In one embodiment, the PEG lipid may be PEG2k-DSPE. In one embodiment, the PEG lipid may be PEG2k-DMA. In one embodiment, the PEG lipid may be PEG2k-C-DMA. In one embodiment, the PEG lipid may be compound S027, disclosed in WO2016/010840 (paragraphs [00240] to [00244]). In one embodiment, the PEG lipid may be PEG2k-DSA. In one embodiment, the PEG lipid may be PEG2k-C11. In some embodiments, the PEG lipid may be PEG2k-C14. In some embodiments, the PEG lipid may be PEG2k-C16. In some embodiments, the PEG lipid may be PEG2k-C18.

### C. Lipid Nanoparticles (LNPs)

[0478] The LNP may contain (i) a biodegradable lipid, (ii) an optional neutral lipid, (iii) a helper lipid, and (iv) a stealth lipid, such as a PEG lipid. The lipid nucleic acid assembly may contain a biodegradable lipid and one or more of a neutral lipid, a helper lipid, and a stealth lipid, such as a PEG lipid.

[0479] The lipid nucleic acid assembly may contain (i) an amine lipid for encapsulation and for endosomal escape, (ii) a neutral lipid for stabilization, (iii) a helper lipid, also for stabilization, and (iv) a stealth lipid, such as a PEG lipid. The lipid nucleic acid assembly may contain an amine lipid and one or more of a neutral lipid, a helper lipid, also for stabilization, and a stealth lipid, such as a PEG lipid.

[0480] An LNP may comprise a nucleic acid, e.g., an RNA, component that includes one or more of an RNA-guided DNA-binding agent, a Cas nuclease mRNA, a Class 2 Cas nuclease mRNA, a Cas9 mRNA, and a gRNA. In some embodiments, a LNP may include a Class 2 Cas nuclease and a gRNA as the RNA component. In some embodiments, n LNP may comprise the RNA component, an amine lipid, a helper lipid, a neutral lipid, and a stealth lipid. In certain LNPs, the helper lipid is cholesterol. In other compositions, the neutral lipid is DSPC. In additional embodiments, the stealth lipid is PEG2k-DMG or PEG2k-C11. In some embodiments, the LNP comprises Lipid A or an equivalent of Lipid A; a helper lipid; a neutral lipid; a stealth lipid; and an RNA such as a gRNA. In some embodiments, the LNP comprises Lipid A or an equivalent of Lipid A; a helper lipid; a stealth lipid; and an RNA such as a gRNA. In some compositions, the amine lipid is Lipid A. In some compositions, the amine lipid is Lipid A or an acetal analog thereof, the helper lipid is cholesterol; the neutral lipid is DSPC; and the stealth lipid is PEG2k-DMG.

[0481] In some embodiments, lipid compositions are described according to the respective molar ratios of the component lipids in the formulation. Embodiments of the present disclosure provide lipid compositions described according to the respective molar ratios of the component lipids in the formulation. In one embodiment, the mol % of the amine lipid may be from about 30 mol % to about 60 mol %. In one embodiment, the mol % of the amine lipid may be from about 40 mol % to about 60 mol %. In one embodiment, the mol % of the amine lipid may be from about 45 mol % to about 60 mol %. In one embodiment, the mol % of the amine lipid may be from about 50 mol % to about 60 mol %. In one embodiment, the mol % of the amine lipid may be from about 55 mol % to about 60 mol %. In one embodiment, the mol % of the amine lipid may be from about 50 mol % to about 55 mol %. In one embodiment, the mol % of the amine lipid may be about 50 mol %. In one embodiment, the mol % of the amine lipid may be about 55 mol %. In some embodiments, the amine lipid mol % of the lipid nucleic acid assembly batch will be ±30%, ±25%, ±20%, ±15%, ±10%, ±5%, or ±2.5% of the target mol %. In some embodiments, the amine lipid mol % of the lipid nucleic acid assembly batch will be ±4 mol %, ±3 mol %, ±2 mol %, ±1.5 mol %, ±1 mol %, ±0.5 mol %, or ±0.25 mol % of the target mol %. All mol % numbers are given as a fraction of the lipid component of the LNPs. In some embodiments, lipid nucleic acid assembly inter-lot variability of the amine lipid mol % will be less than 15%, less than 10% or less than 5%.

[0482] In one embodiment, the mol % of the neutral lipid may be from about 5 mol % to about 15 mol %. In one embodiment, the mol % of the neutral lipid may be from about 7 mol % to about 12 mol %. In one embodiment, the mol % of the neutral lipid may be about 9 mol %. In some embodiments, the neutral lipid mol % of the lipid nucleic acid assembly batch will be ±30%, ±25%, ±20%, ±15%, ±10%, ±5%, or ±2.5% of the target neutral lipid mol %. In some embodiments, lipid nucleic acid assembly inter-lot variability will be less than 15%, less than 10% or less than 5%.

[0483] In one embodiment, the mol % of the helper lipid may be from about 20 mol % to about 60 mol %. In one embodiment, the mol % of the helper lipid may be from about 25 mol % to about 55 mol %. In one embodiment, the mol % of the helper lipid may be from about 25 mol % to about 50 mol %. In one embodiment, the mol % of the helper lipid may be from about 25 mol % to about 40 mol %. In one embodiment, the mol % of the helper lipid may be from about 30 mol % to about 50 mol %. In one embodiment, the mol % of the helper lipid may be from about 30 mol % to about 40 mol %. In one embodiment, the mol % of the helper lipid is adjusted based on amine lipid, neutral lipid, and PEG lipid concentrations to bring the lipid component to 100 mol %. In some embodiments, the helper mol % of the lipid nucleic acid assembly batch will be ±30%, ±25%, ±20%, ±15%, ±10%, ±5%, or ±2.5% of the target mol %. In some embodiments, lipid nucleic acid assembly inter-lot variability will be less than 15%, less than 10% or less than 5%.

[0484] In one embodiment, the mol % of the PEG lipid may be from about 1 mol % to about 10 mol %. In one embodiment, the mol % of the PEG lipid may be from about 2 mol % to about 10 mol %. In one embodiment, the mol % of the PEG lipid may be from about 1 mol % to about 3 mol %. In one embodiment, the mol % of the PEG lipid may be from about 2 mol % to about 4 mol %. In one embodiment, the mol % of the PEG lipid may be from about 1.5 mol % to about 2 mol %. In one embodiment, the mol % of the PEG lipid may be from about 2.5 mol % to about 4 mol %. In one embodiment, the mol % of the PEG lipid may be about 3 mol %. In one embodiment, the mol % of the PEG lipid may be about 2.5 mol %. In one embodiment, the mol % of the PEG lipid may be about 2 mol %. In one embodiment, the mol % of the PEG lipid may be about 1.5 mol %. In some embodiments, the PEG lipid mol % of the lipid nucleic acid assembly batch will be ±30%, ±25%, ±20%, ±15%, ±10%, ±5%, or ±2.5% of the target PEG lipid mol %. In some embodiments, LNP, e.g. the LNP composition, inter-lot variability will be less than 15%, less than 10% or less than 5%.

[0485] Embodiments of the present disclosure provide LNP compositions, for example, LNP compositions comprising an ionizable lipid (e.g., Lipid A or one of its analogs), a helper lipid, a helper lipid, and a PEG lipid, described according to the respective molar ratios of the component lipids in the formulation. In certain embodiments, the amount of the ionizable lipid is from about 25 mol % to about 45 mol %; the amount of the neutral lipid is from about 10 mol % to about 30 mol %; the amount of the helper lipid is from about 25 mol % to about 65 mol %; and the amount of the PEG lipid is from about 1.5 mol % to about 3.5 mol %. In certain embodiments, the amount of the ionizable lipid is from about 29-44 mol % of the lipid component; the amount of the neutral lipid is from about 11-28 mol % of the lipid component; the amount of the helper lipid is from about 28-55 mol % of the lipid component; and the amount of the PEG lipid is from about 2.3-3.5 mol % of the lipid component. In certain embodiments, the amount of the ionizable lipid is from about 29-38 mol % of the lipid component; the amount of the neutral lipid is from about 11-20 mol % of the lipid component; the amount of the helper lipid is from about 43-55 mol % of the lipid component; and the amount of the PEG lipid is from about 2.3-2.7 mol % of the lipid component. In certain embodiments, the amount of the ionizable lipid is from about 25-34 mol % of the lipid component; the amount of the neutral lipid is from about 10-20 mol % of the lipid component; the amount of the helper lipid is from about 45-65 mol % of the lipid component; and the amount of the PEG lipid is from about 2.5-3.5 mol % of the lipid component. In certain embodiments, the ionizable lipid is about 30-43 mol % of the lipid component; the amount of the neutral lipid is about 10-17 mol % of the lipid component; the amount of the helper lipid is about 43.5-56 mol % of the lipid component; and the amount of the PEG lipid is about 1.5-3 mol % of the lipid component. In certain embodiments, the ionizable lipid is about 33 mol % of the lipid component; the amount of the neutral lipid is about 15 mol % of the lipid component; the amount of the helper lipid is about 49 mol % of the lipid component; and the amount of the PEG lipid is about 3 mol % of the lipid component. In certain embodiments, the amount of the ionizable lipid is about 32.9 mol % of the lipid component; the amount of the neutral lipid is about 15.2 mol % of the lipid component; the amount of the helper lipid is about 49.2 mol % of the lipid component; and the amount of the PEG lipid is about 2.7 mol % of the lipid component.

[0486] In certain embodiments, the amount of the ionizable lipid (e.g., Lipid A or one of its analogs) is about 20-50 mol %, about 25-34 mol %, about 25-38 mol %, about 25-45 mol %, about 29-38 mol %, about 29-43 mol %, about 29-34 mol %, about 30-34 mol %, about 30-38 mol %, about 30-43 mol %, about 30-43 mol %, or about 33 mol %. In certain embodiments, the amount of the neutral lipid is about 10-30 mol %, about 11-30 mol %, about 11-20 mol %, about 13-17 mol %, or about 15 mol %. In certain embodiments, the amount of the helper lipid is about 35-50 mol %, about 35-65 mol %, about 35-55 mol %, about 38-50 mol %, about 38-55 mol %, about 38-65 mol %, about 40-50 mol %, about 40-65 mol %, about 43-65 mol %, about 43-55 mol %, or about 49 mol %. In certain embodiments, the amount of the PEG lipid is about 1.5-3.5 mol %, about 2.0-2.7 mol %, about 2.0-3.5 mol %, about 2.3-3.5 mol %, about 2.3-2.7 mol %, about 2.5-3.5 mol %, about 2.5-2.7 mol %, about 2.9-3.5 mol %, or about 2.7 mol %.

[0487] Other embodiments of the present disclosure provide LNP compositions, for example, LNP compositions comprising an ionizable lipid (e.g., Lipid D or one of its analogs), a helper lipid, a helper lipid, and a PEG lipid, described according to the respective molar ratios of the component lipids in the formulation. In certain embodiments, the amount of the ionizable lipid is from about 25 mol % to about 50 mol %; the amount of the neutral lipid is from about 7 mol % to about 25 mol %; the amount of the helper lipid is from about 39 mol % to about 65 mol %; and the amount of the PEG lipid is from about 0.5 mol % to about 1.8 mol %. In certain embodiments, the amount of the ionizable lipid is from about 27-40 mol % of the lipid component; the amount of the neutral lipid is from about 10-20 mol % of the lipid component; the amount of the helper lipid is from about 50-60 mol % of the lipid component; and the amount of the PEG lipid is from about 0.9-1.6 mol % of the lipid component. In certain embodiments, the amount of the ionizable lipid is from about 30-45 mol % of the lipid component; the amount of the neutral lipid is from about 10-15 mol % of the lipid component; the amount of the helper lipid is from about 39-59 mol % of the lipid component; and the amount of the PEG lipid is from about 1-1.5 mol % of the lipid component. In certain embodiments, the amount of the ionizable lipid is from about 30-45 mol % of the lipid component; the amount of the neutral lipid is from about 10-15 mol % of the lipid component; the amount of the helper lipid is from about 39-59 mol % of the lipid component; and the amount of the PEG lipid is from about 1-1.5 mol % of the lipid component. In certain embodiments, the ionizable lipid is about 30 mol % of the lipid component; the amount of the neutral lipid is about 10 mol % of the lipid component; the amount of the helper lipid is about 59 mol % of the lipid component; and the amount of the PEG lipid is about 1-1.5 mol % of the lipid component. In certain embodiments, the amount of the ionizable lipid is about 40 mol % of the lipid component; the amount of the neutral lipid is about 15 mol % of the lipid component; the amount of the helper lipid is about 43.5 mol % of the lipid component; and the amount of the PEG lipid is about 1.5 mol % of the lipid component. In certain embodiments, the amount of the ionizable lipid is about 50 mol % of the lipid component; the amount of the neutral lipid is about 10 mol % of the lipid component; the amount of the helper lipid is about 39 mol % of the lipid component; and the amount of the PEG lipid is about 1 mol % of the lipid component.

[0488] In certain embodiments, the amount of the ionizable lipid (e.g., Lipid D or one of its analogs) is about 20-55 mol %, about 20-45 mol %, about 20-40 mol %, about 27-40 mol %, about 27-45 mol %, about 27-55 mol %, about 30-40 mol %, about 30-45 mol %, about 30-55 mol %, about 30 mol %, about 40 mol %, or about 50 mol %. In certain embodiments, the amount of the neutral lipid is about 7-25 mol %, about 10-25 mol %, about 10-20 mol %, about 15-20 mol %, about 8-15 mol %, about 10-15 mol %, about 10 mol %, or about 15 mol %. In certain embodiments, the amount of the helper lipid is about 39-65 mol %, about 39-59 mol %, about 40-60 mol %, about 40-65 mol %, about 40-59 mol %, about 43-65 mol %, about 43-60 mol %, about 43-59 mol %, or about 50-65 mol %, about 50-59 mol %, about 59 mol %, or about 43.5 mol %. In certain embodiments, the amount of the PEG lipid is about 0.5-1.8 mol %, about 0.8-1.6 mol %, about 0.8-1.5 mol %, 0.9-1.8 mol %, about 0.9-1.6 mol %, about 0.9-1.5 mol %, 1-1.8 mol %, about 1-1.6 mol %, about 1-1.5 mol %, about 1 mol %, or about 1.5 mol %.

[0489] In some embodiments, the cargo includes an mRNA encoding an RNA-guided DNA-binding agent (e.g. a Cas nuclease, a Class 2 Cas nuclease, or Cas9), or a gRNA or a nucleic acid encoding a gRNA, or a combination of mRNA and gRNA. In one embodiment, a LNP may comprise a Lipid A or its equivalents, or an amine lipid as provided in WO2020219876; or Lipid D or an amine lipid provided in WO2020/072605. In some aspects, the amine lipid is Lipid A, or Lipid D. In some aspects, the amine lipid is a Lipid A equivalent, e.g. an analog of Lipid A, or an amine lipid provided in WO2020/219876. In certain aspects, the amine lipid is an acetal analog of Lipid A, optionally, an amine lipid provided in WO2020/219876. In some aspects, the amine lipid is a Lipid D or an amine lipid found in in W2020072605. In various embodiments, a LNP comprises an amine lipid, a neutral lipid, a helper lipid, and a PEG lipid. In some embodiments, the helper lipid is cholesterol. In some embodiments, the neutral lipid is DSPC. In specific embodiments, PEG lipid is PEG2k-DMG. In some embodiments, a LNP may comprise a Lipid A, a helper lipid, a neutral lipid, and a PEG lipid. In some embodiments, a LNP comprises an amine lipid, DSPC, cholesterol, and a PEG lipid. In some embodiments, the LNP comprises a PEG lipid comprising DMG. In some embodiments, the amine lipid is selected from Lipid A, and an equivalent of Lipid A, including an acetal analog of Lipid A, or an amine lipid provided in WO2020/219876; or Lipid D or an amine lipid provided in WO2020/072605. In additional embodiments, a LNP comprises Lipid A, cholesterol, DSPC, and PEG2k-DMG. In additional embodiments, a LNP comprises Lipid D, cholesterol, DSPC, and PEG2k-DMG.

[0490] Embodiments of the present disclosure also provide lipid compositions described according to the molar ratio between the positively charged amine groups of the amine lipid (N) and the negatively charged phosphate groups (P) of the nucleic acid to be encapsulated. This may be mathematically represented by the equation N/P. In some embodiments, a LNP may comprise a lipid component that comprises an amine lipid, a helper lipid, a neutral lipid, and a helper lipid; and a nucleic acid component, wherein the N/P ratio is about 3 to 10. In some embodiments, the LNPs comprise molar ratios of an amine lipid to RNA/DNA phosphate (N:P) of about 4.5, 5.0, 5.5, 6.0, or 6.5. In some embodiments, a LNP may comprise a lipid component that comprises an amine lipid, a helper lipid, a neutral lipid, and a helper lipid; and an RNA component, wherein the N/P ratio is about 3 to 10. In one embodiment, the N/P ratio may about 5-7. In one embodiment, the N/P ratio may about 4.5-8. In one embodiment, the N/P ratio may about 6. In one embodiment, the N/P ratio may be 6±1. In one embodiment, the N/P ratio may about 6±0.5. In some embodiments, the N/P ratio will be ±30%, 25%, ±20%, 15%, ±10%, 5%, or ±2.5% of the target N/P ratio. In some embodiments, lipid nucleic acid assembly inter-lot variability will be less than 15%, less than 10% or less than 5%.

[0491] In some embodiments, the lipid nucleic acid assembly comprises an RNA component, which may comprise an mRNA, such as an mRNA encoding a Cas nuclease. In one embodiment, RNA component may comprise a Cas9 mRNA. In some compositions comprising an mRNA encoding a Cas nuclease, the lipid nucleic acid assembly further comprises a gRNA nucleic acid, such as a gRNA. In some embodiments, the RNA component comprises a Cas nuclease mRNA and a gRNA. In some embodiments, the RNA component comprises a Class 2 Cas nuclease mRNA and a gRNA.

[0492] In some embodiments, a LNP may comprise an mRNA encoding a Cas nuclease such as a Class 2 Cas nuclease, an amine lipid, a helper lipid, a neutral lipid, and a PEG lipid. In certain LNPs comprising an mRNA encoding a Cas nuclease such as a Class 2 Cas nuclease, the helper lipid is cholesterol. In other compositions comprising an mRNA encoding a Cas nuclease such as a Class 2 Cas nuclease, the neutral lipid is DSPC. In additional embodiments comprising an mRNA encoding a Cas nuclease such as a Class 2 Cas nuclease, the PEG lipid is PEG2k-DMG or PEG2k-C11. In specific compositions comprising an mRNA encoding a Cas nuclease such as a Class 2 Cas nuclease, the amine lipid is selected from Lipid A and its equivalents, such as an acetal analog of Lipid A, or amine lipids provided in WO2020/219876; or Lipid D and amine lipids provided in WO2020/072605.

[0493] In some embodiments, a LNP may comprise a gRNA. In some embodiments, a LNP may comprise an amine lipid, a gRNA, a helper lipid, a neutral lipid, and a PEG lipid. In certain LNPs comprising a gRNA, the helper lipid is cholesterol. In some compositions comprising a gRNA, the neutral lipid is DSPC. In additional embodiments comprising a gRNA, the PEG lipid is PEG2k-DMG or PEG2k-C11. In some embodiments, the amine lipid is selected from Lipid A and its equivalents, such as an acetal analog of Lipid A, or amine lipids provided in WO2020/219876 and their equivalents; or Lipid D and amine lipids provided in WO2020/072605 and their equivalents.

[0494] In one embodiment, a LNP may comprise an sgRNA. In one embodiment, a LNP may comprise a Cas9 sgRNA. In one embodiment, a LNP may comprise a Cpf1 sgRNA. In some compositions comprising an sgRNA, the lipid nucleic acid assembly includes an amine lipid, a helper lipid, a neutral lipid, and a PEG lipid. In certain compositions comprising an sgRNA, the helper lipid is cholesterol. In other compositions comprising an sgRNA, the neutral lipid is DSPC. In additional embodiments comprising an sgRNA, the PEG lipid is PEG2k-DMG or PEG2k-C11. In some embodiments, the amine lipid is selected from Lipid A and its equivalents, such as acetal analogs of Lipid A, or amine lipids provided in WO2020/219876; or Lipid D and amine lipids provided in WO2020/072605.

[0495] In some embodiments, a LNP comprises an mRNA encoding a Cas nuclease and a gRNA, which may be an sgRNA. In one embodiment, a LNP may comprise an amine lipid, an mRNA encoding a Cas nuclease, a gRNA, a helper lipid, a neutral lipid, and a PEG lipid. In certain compositions comprising an mRNA encoding a Cas nuclease and a gRNA, the helper lipid is cholesterol. In some compositions comprising an mRNA encoding a Cas nuclease and a gRNA, the neutral lipid is DSPC. In additional embodiments comprising an mRNA encoding a Cas nuclease and a gRNA, the PEG lipid is PEG2k-DMG or PEG2k-C11. In some embodiments, the amine lipid is selected from Lipid A and its equivalents, such as acetal analogs of Lipid A, or amine lipids provided in WO2020/219876; or Lipid D and amine lipids provided in WO2020/072605.

[0496] In some embodiments, the LNPs include a Cas nuclease mRNA, such as a Class 2 Cas mRNA and at least one gRNA. In some embodiments, the LNP includes a ratio of gRNA to Cas nuclease mRNA, such as Class 2 Cas nuclease mRNA from about 25:1 to about 1:25 wt/wt. In some embodiments, the lipid nucleic acid assembly formulation includes a ratio of gRNA to Cas nuclease mRNA, such as Class 2 Cas nuclease mRNA from about 10:1 to about 1:10. In some embodiments, the lipid nucleic acid assembly formulation includes a ratio of gRNA to Cas nuclease mRNA, such as Class 2 Cas nuclease mRNA from about 8:1 to about 1:8. As measured herein, the ratios are by weight. In some embodiments, the lipid nucleic acid assembly formulation includes a ratio of gRNA to Cas nuclease mRNA, such as Class 2 Cas mRNA from about 5:1 to about 1:5. In some embodiments, ratio range is about 3:1 to 1:3, about 2:1 to 1:2, about 5:1 to 1:2, about 5:1 to 1:1, about 3:1 to 1:2, about 3:1 to 1:1, about 3:1, about 2:1 to 1:1. In some embodiments, the gRNA to mRNA ratio is about 3:1 or about 2:1. In some embodiments the ratio of gRNA to Cas nuclease mRNA, such as Class 2 Cas nuclease is about 1:1. In some embodiments the ratio of gRNA to Cas nuclease mRNA, such as Class 2 Cas nuclease is about 1:2. The ratio may be about 25:1, 10:1, 5:1, 3:1, 2:1, 1:1, 1:2, 1:3, 1:5, 1:10, or 1:25.

[0497] The LNPs disclosed herein may include a template nucleic acid. The template nucleic acid may be co-formulated with an mRNA encoding a Cas nuclease, such as a Class 2 Cas nuclease mRNA. In some embodiments, the template nucleic acid may be co-formulated with a guide RNA. In some embodiments, the template nucleic acid may be co-formulated with both an mRNA encoding a Cas nuclease and a guide RNA. In some embodiments, the template nucleic acid may be formulated separately from an mRNA encoding a Cas nuclease or a guide RNA. The template nucleic acid may be delivered with, or separately from the LNPs. In some embodiments, the template nucleic acid may be single- or double-stranded, depending on the desired repair mechanism. The template may have regions of homology to the target DNA, or to sequences adjacent to the target DNA.

[0498] In some embodiments, lipid nucleic acid assemblies are formed by mixing an aqueous RNA solution with an organic solvent-based lipid solution, e.g., 100% ethanol. Suitable solutions or solvents include or may contain: water, PBS, Tris buffer, NaCl, citrate buffer, ethanol, chloroform, diethylether, cyclohexane, tetrahydrofuran, methanol, isopropanol. A pharmaceutically acceptable buffer, e.g., for in vivo administration of lipid nucleic acid assemblies, may be used. In some embodiments, a buffer is used to maintain the pH of the composition comprising lipid nucleic acid assemblies at or above pH 6.5. In some embodiments, a buffer is used to maintain the pH of the composition comprising lipid nucleic acid assemblies at or above pH 7.0. In some embodiments, the composition has a pH ranging from about 7.2 to about 7.7. In additional embodiments, the composition has a pH ranging from about 7.3 to about 7.7 or ranging from about 7.4 to about 7.6. In further embodiments, the composition has a pH of about 7.2, 7.3, 7.4, 7.5, 7.6, or 7.7. The pH of a composition may be measured with a micro pH probe. In some embodiments, a cryoprotectant is included in the composition. Non-limiting examples of cryoprotectants include sucrose, trehalose, glycerol, DMSO, and ethylene glycol. Exemplary compositions may include up to 10% cryoprotectant, such as, for example, sucrose. In some embodiments, the LNP may include about 1, 2, 3, 4, 5, 6, 7, 8, 9, or 10% cryoprotectant. In some embodiments, the LNP may include about 1, 2, 3, 4, 5, 6, 7, 8, 9, or 10% sucrose. In some embodiments, the LNP may include a buffer. In some embodiments, the buffer may comprise a phosphate buffer (PBS), a Tris buffer, a citrate buffer, and mixtures thereof. In some exemplary embodiments, the buffer comprises NaCl. In some embodiments, NaCl is omitted. Exemplary amounts of NaCl may range from about 20 mM to about 45 mM. Exemplary amounts of NaCl may range from about 40 mM to about 50 mM. In some embodiments, the amount of NaCl is about 45 mM. In some embodiments, the buffer is a Tris buffer. Exemplary amounts of Tris may range from about 20 mM to about 60 mM. Exemplary amounts of Tris may range from about 40 mM to about 60 mM. In some embodiments, the amount of Tris is about 50 mM. In some embodiments, the buffer comprises NaCl and Tris. Certain exemplary embodiments of the LNPs contain 5% sucrose and 45 mM NaCl in Tris buffer. In other exemplary embodiments, compositions contain sucrose in an amount of about 5% w/v, about 45 mM NaCl, and about 50 mM Tris at pH 7.5. The salt, buffer, and cryoprotectant amounts may be varied such that the osmolality of the overall formulation is maintained. For example, the final osmolality may be maintained at less than 450 mOsm/L. In further embodiments, the osmolality is between 350 and 250 mOsm/L. Certain embodiments have a final osmolality of 300+/−20 mOsm/L.

[0499] In some embodiments, microfluidic mixing, T-mixing, or cross-mixing is used. In certain aspects, flow rates, junction size, junction geometry, junction shape, tube diameter, solutions, or RNA and lipid concentrations may be varied. Lipid nucleic acid assemblies or LNPs may be concentrated or purified, e.g., via dialysis, tangential flow filtration, or chromatography. The lipid nucleic acid assemblies may be stored as a suspension, an emulsion, or a lyophilized powder, for example. In some embodiments, a LNP is stored at 2-8° C., in certain aspects, the LNPs are stored at room temperature. In additional embodiments, a LNP is stored frozen, for example at −20° C. or −80° C. In other embodiments, a LNP is stored at a temperature ranging from about 0° C. to about −80° C. Frozen LNPs may be thawed before use, for example on ice, at 4° C., at room temperature, or at 25° C. Frozen LNPs may be maintained at various temperatures, for example on ice, at 4° C., at room temperature, at 25° C., or at 37° C.

[0500] In some embodiments, the concentration of the LNPs in the LNP composition is about 1-10 ug/mL, about 2-10 ug/mL, about 2.5-10 ug/mL, about 1-5 ug/mL, about 2-5 ug/mL, about 2.5-5 ug/mL, about 0.04 ug/mL, about 0.08 ug/mL, about 0.16 ug/mL, about 0.25 ug/mL, about 0.63 ug/mL, about 1.25 ug/mL, about 2.5 ug/mL, or about 5 ug/mL.

[0501] In some embodiments, the LNP comprises a stealth lipid, optionally wherein:
[0502] (i) the LNP comprises a lipid component and the lipid component comprises: about 50-60 mol % amine lipid such as Lipid A or Lipid D, about 8-10 mol % neutral lipid; and about 2.5-4 mol % stealth lipid (e.g., a PEG lipid), wherein the remainder of the lipid component is helper lipid, and wherein the N/P ratio of the LNP is about 6;
[0503] (ii) the LNP comprises about 50-60 mol % amine lipid such as Lipid A or Lipid D; about 27-39.5 mol % helper lipid; about 8-10 mol % neutral lipid; and about 2.5-4 mol % stealth lipid (e.g., a PEG lipid), wherein the N/P ratio of the LNP is about 5-7 (e.g., about 6);
[0504] (iii) the LNP comprises a lipid component and the lipid component comprises: about 50-60 mol % amine lipid such as Lipid A or Lipid D; about 5-15 mol % neutral lipid; and about 2.5-4 mol % stealth lipid (e.g., a PEG lipid), wherein the remainder of the lipid component is helper lipid, and wherein the N/P ratio of the LNP is about 3-10;
[0505] (iv) the LNP comprises a lipid component and the lipid component comprises: about 40-60 mol % amine lipid such as Lipid A or Lipid D; about 5-15 mol % neutral lipid; and about 2.5-4 mol % stealth lipid (e.g., a PEG lipid), wherein the remainder of the lipid component is helper lipid, and wherein the N/P ratio of the LNP is about 6;
[0506] (v) the LNP comprises a lipid component and the lipid component comprises: about 50-60 mol % amine lipid such as Lipid A or Lipid D; about 5-15 mol % neutral lipid; and about 1.5-10 mol % stealth lipid (e.g., a PEG lipid), wherein the remainder of the lipid component is helper lipid, and wherein the N/P ratio of the LNP is about 6;
[0507] (vi) the LNP comprises a lipid component and the lipid component comprises: about 40-60 mol % amine lipid such as Lipid A or Lipid D; about 0-10 mol % neutral lipid; and about 1.5-10 mol % stealth lipid (e.g., a PEG lipid), wherein the remainder of the lipid component is helper lipid, and wherein the N/P ratio of the LNP is about 3-10;
[0508] (vii) the LNP comprises a lipid component and the lipid component comprises: about 40-60 mol % amine lipid such as Lipid A or Lipid D; less than about 1 mol % neutral lipid; and about 1.5-10 mol % stealth lipid (e.g., a PEG lipid), wherein the remainder of the lipid component is helper lipid, and wherein the N/P ratio of the LNP is about 3-10;
[0509] (viii) the LNP comprises a lipid component and the lipid component comprises: about 40-60 mol % amine lipid such as Lipid A or Lipid D; and about 1.5-10 mol % stealth lipid (e.g., a PEG lipid), wherein the remainder of the lipid component is helper lipid, wherein the N/P ratio of the LNP composition is about 3-10, and wherein the LNP is essentially free of or free of neutral phospholipid; or
[0510] (ix) the LNP comprises a lipid component and the lipid component comprises: about 50-60 mol % amine lipid such as Lipid A or Lipid D; about 8-10 mol-% neutral lipid; and about 2.5-4 mol % stealth lipid (e.g., a PEG lipid), wherein the remainder of the lipid component is helper lipid, and wherein the N/P ratio of the LNP is about 3-7.

[0511] In some embodiments, the LNP comprises a lipid component and the lipid component comprises: about 50 mol % amine lipid such as Lipid A or Lipid D; about 9 mol % neutral lipid such as DSPC; about 3 mol % of stealth lipid such as a PEG lipid, such as PEG2k-DMG, and the remainder of the lipid component is helper lipid such as cholesterol wherein the N/P ratio of the LNP is about 6.

[0512] In some embodiments, the LNP comprises a lipid component and the lipid component comprises: about 50 mol % Lipid A; about 9 mol % DSPC; about 3 mol % of PEG2k-DMG, and the remainder of the lipid component is cholesterol wherein the N/P ratio of the LNP is about 6.

[0513] In some embodiments, the LNP comprises a lipid component and the lipid component comprises: about 35 mol % Lipid A; about 15 mol % neutral lipid; about 47.5 mol % helper lipid; and about 2.5 mol % stealth lipid (e.g., PEG lipid), and wherein the N/P ratio of the LNP composition is about 3-7.

[0514] In some embodiments, the LNP comprises a lipid component and the lipid component comprises: about 35 mol % Lipid D; about 15 mol % neutral lipid; about 47.5 mol % helper lipid; and about 2.5 mol % stealth lipid (e.g., PEG lipid), and wherein the N/P ratio of the LNP composition is about 3-7.

[0515] In some embodiments, the LNP comprises a lipid component and the lipid component comprises: about 25-45 mol % amine lipid, such as Lipid A; about 10-30 mol % neutral lipid; about 25-65 mol % helper lipid; and about 1.5-3.5 mol % stealth lipid (e.g., PEG lipid), and wherein the N/P ratio of the LNP composition is about 3-7.

[0516] In some embodiments, the LNP comprises a lipid component, wherein:
[0517] a. the amount of the amine lipid is about 29-44 mol % of the lipid component; the amount of the neutral lipid is about 11-28 mol % of the lipid component; the amount of the helper lipid is about 28-55 mol % of the lipid component; and the amount of the PEG lipid is about 2.3-3.5 mol % of the lipid component
[0518] b. the amount of the amine lipid is about 29-38 mol % of the lipid component; the amount of the neutral lipid is about 11-20 mol % of the lipid component; the amount of the helper lipid is about 43-55 mol % of the lipid component; and the amount of the PEG lipid is about 2.3-2.7 mol % of the lipid component;
[0519] c. the amount of the amine lipid is about 25-34 mol % of the lipid component; the amount of the neutral lipid is about 10-20 mol % of the lipid component; the amount of the helper lipid is about 45-65 mol % of the lipid component; and the amount of the PEG lipid is about 2.5-3.5 mol % of the lipid component; or
[0520] d. the amount of the amine lipid is about 30-43 mol % of the lipid component; the amount of the neutral lipid is about 10-17 mol % of the lipid component; the amount of the helper lipid is about 43.5-56 mol % of the lipid component; and the amount of the PEG lipid is about 1.5-3 mol % of the lipid component.

[0521] In some embodiments, the LNP comprises a lipid component and the lipid component comprises: about 25-50 mol % amine lipid, such as Lipid D; about 7-25 mol % neutral lipid; about 39-65 mol % helper lipid; and about 0.5-1.8 mol % stealth lipid (e.g., PEG lipid), and wherein the N/P ratio of the LNP composition is about 3-7.

[0522] In some embodiments, the LNP comprises a lipid component wherein the amount of the amine lipid is about 30-45 mol % of the lipid component; or about 30-40 mol % of the lipid component; optionally about 30 mol %, 40 mol %, or 50 mol % of the lipid component. In some embodiments, the LNP comprises a lipid component wherein the amount of the neutral lipid is about 10-20 mol % of the lipid component; or about 10-15 mol % of the lipid component; optionally about 10 mol % or 15 mol % of the lipid component. In some embodiments, the LNP comprises a lipid component wherein the amount of the helper lipid is about 50-60 mol % of the lipid component; about 39-59 mol % of the lipid component; or about 43.5-59 mol % of the lipid component; optionally about 59 mol % of the lipid component; about 43.5 mol % of the lipid component; or about 39 mol % of the lipid component. In some embodiments, the LNP comprises a lipid component wherein the amount of the PEG lipid is about 0.9-1.6 mol % of the lipid component; or about 1-1.5 mol % of the lipid component; optionally about 1 mol % of the lipid component or about 1.5 mol % of the lipid component

[0523] In some embodiments, the LNP comprises a lipid component, wherein:
[0524] a. the amount of the ionizable lipid is about 27-40 mol % of the lipid component; the amount of the neutral lipid is about 10-20 mol % of the lipid component; the amount of the helper lipid is about 50-60 mol % of the lipid component; and the amount of the PEG lipid is about 0.9-1.6 mol % of the lipid component;
[0525] b. the amount of the ionizable lipid is from about 30-45 mol % of the lipid component; the amount of the neutral lipid is from about 10-15 mol % of the lipid component; the amount of the helper lipid is from about 39-59 mol % of the lipid component; and the amount of the PEG lipid is from about 1-1.5 mol % of the lipid component;
[0526] c. the amount of the ionizable lipid is about 30 mol % of the lipid component; the amount of the neutral lipid is about 10 mol % of the lipid component; the amount of the helper lipid is about 59 mol % of the lipid component; and the amount of the PEG lipid is about 1-1.5 mol % of the lipid component;
[0527] d. the amount of the ionizable lipid is about 40 mol % of the lipid component; the amount of the neutral lipid is about 15 mol % of the lipid component; the amount of the helper lipid is about 43.5 mol % of the lipid component; and the amount of the PEG lipid is about 1.5 mol % of the lipid component; or
[0528] e. the amount of the ionizable lipid is about 50 mol % of the lipid component; the amount of the neutral lipid is about 10 mol % of the lipid component; the amount of the helper lipid is about 39 mol % of the lipid component; and the amount of the PEG lipid is about 1 mol % of the lipid component.

[0529] In some embodiments, the LNP has a diameter of about 1-250 nm, 10-200 nm, about 20-150 nm, about 50-150 nm, about 50-100 nm, about 50-120 nm, about 60-100 nm, about 75-150 nm, about 75-120 nm, or about 75-100 nm. In some embodiments, the LNP has a diameter of less than 100 nm. In some embodiments, the LNP composition comprises a population of the LNP with an average diameter of about 10-200 nm, about 20-150 nm, about 50-150 nm, about 50-100 nm, about 50-120 nm, about 60-100 nm, about 75-150 nm, about 75-120 nm, or about 75-100 nm. In some embodiments, the LNP has an average diameter of less than 100 nm.

[0530] In some embodiments, the LNP comprises: about 40-60 mol-% amine lipid; about 5-15 mol-% neutral lipid; and about 1.5-10 mol-% PEG lipid, wherein the remainder of the lipid component is helper lipid, and wherein the N/P ratio of the LNP composition is about 3-10. In some embodiments, the LNP comprises: about 50-60 mol-% amine lipid; about 8-10 mol-% neutral lipid; and about 2.5-4 mol-% PEG lipid, wherein the remainder of the lipid component is helper lipid, and wherein the N/P ratio of the LNP composition is about 3-8. In some embodiments, the LNP comprises: about 50-60 mol-% amine lipid; about 5-15 mol-% DSPC; and about 2.5-4 mol-% PEG lipid, wherein the remainder of the lipid component is cholesterol, and wherein the N/P ratio of the LNP composition is 3-8±0.2.

[0531] In embodiments, the average diameter is a Z-average diameter. In certain embodiments, the Z-average diameter is measured by dynamic light scattering (DLS) using methods known in the art. For example, average particle size and polydispersity can be measured by dynamic light scattering (DLS) using a Malvern Zetasizer DLS instrument. LNP samples are diluted with PBS buffer prior to being measured by DLS. Z-average diameter and number average diameter along with a polydispersity index (pdi) can be determined. The Z average is the intensity weighted mean hydrodynamic size of the ensemble collection of particles. The number average is the particle number weighted mean hydrodynamic size of the ensemble collection of particles. A Malvern Zetasizer instrument can also be used to measure the zeta potential of the LNP using methods known in the art.

### D. Arrangement of Components in LNPs

[0532] In some embodiments, the first genome editing tool, the second genome editing tool, or the at least one gRNA is contained in at least one LNP. In some embodiments, the first genome editing tool, the second genome editing tool, and the gRNAs are collectively contained in: (i) a first lipid nanoparticle (LNP) comprising the second genomic editor and a first gRNA, (ii) a second LNP comprising the first genomic editor or the base editor, (iii) a third LNP comprising a uracil glycosylase inhibitor (UGI), (iv) a fourth LNP comprising a second gRNA, (v) a fifth LNP comprising a third gRNA, and (vi) a sixth LNP comprising a fourth gRNA. In some embodiments, the first genome editing tool, the second genome editing tool, and the gRNAs are collectively contained in: (i) a first lipid nanoparticle (LNP) comprising the second genomic editor and a first gRNA, (ii) a second LNP comprising the first genomic editor or the base editor, (iii) a third LNP comprising a uracil glycosylase inhibitor (UGI), (iv) a fourth LNP comprising a second gRNA and a third gRNA, and (v) a fifth LNP comprising a fourth gRNA. In some embodiments, the first genome editing tool, the second genome editing tool, and the gRNAs are collectively contained in: (i) a first lipid nanoparticle (LNP) comprising the second genomic editor and a first gRNA, (ii) a second LNP comprising the first genomic editor or the base editor and comprising a uracil glycosylase inhibitor (UGI), (iii) a third LNP comprising a second gRNA, (iv) a fourth LNP comprising a third gRNA, and (v) a fifth LNP comprising a fourth gRNA. In some embodiments, the first genome editing tool, the second genome editing tool, and the gRNAs are collectively contained in: (i) a first lipid nanoparticle (LNP) comprising the second genomic editor and a first gRNA, (ii) a second LNP comprising the first genomic editor or the base editor and comprising a uracil glycosylase inhibitor (UGI), (iii) a third LNP comprising a second gRNA and a third gRNA, and (iv) a fourth LNP comprising a fourth gRNA. In some embodiments, the first genome editing tool, the second genome editing tool, and the gRNAs are collectively contained in: (i) a first lipid nanoparticle (LNP) comprising the second genomic editor and a first gRNA, (ii) a second LNP comprising the first genomic editor or the base editor, (iii) a third LNP comprising a uracil glycosylase inhibitor (UGI), (iv) a fourth LNP comprising a second gRNA, a third gRNA, and a fourth gRNA. In some embodiments, the first genome editing tool, the second genome editing tool, and the gRNAs are collectively contained in: (i) a first lipid nanoparticle (LNP) comprising the second genomic editor and a first gRNA, (ii) a second LNP comprising a uracil glycosylase inhibitor (UGI), (iii) a third LNP comprising the first genomic editor or the base editor and comprising a second gRNA, (iv) a fourth LNP comprising the first genomic editor or the base editor and comprising a third gRNA, and (v) a fifth LNP comprising the first genomic editor or the base editor and comprising a fourth gRNA. In some embodiments, the first genome editing tool, the second genome editing tool, and the gRNAs are collectively contained in: (i) a first lipid nanoparticle (LNP) comprising the second genomic editor and a first gRNA, (ii) a second LNP comprising a uracil glycosylase inhibitor (UGI), (iii) a third LNP comprising the first genomic editor or the base editor and comprising a second gRNA and a third gRNA, and (iv) a fourth LNP comprising the first genomic editor or the base editor and comprising a fourth gRNA. In some embodiments, the first genome editing tool, the second genome editing tool, and the gRNAs are collectively contained in the first through fourth LNPs, the first through fifth LNPs, or the first through sixth LNPs, and in one or more additional LNP comprising a fifth gRNA. In some embodiments, the one or more additional LNP further comprises a sixth gRNA. In some embodiments, the one or more additional LNP further comprises a seventh gRNA. In some embodiments, the one or more additional LNP further comprises an eighth gRNA. In some embodiments, the one or more additional LNP further comprises a ninth gRNA. In some embodiments, the one or more additional LNP further comprises a tenth gRNA.

[0533] In some embodiments, the second genomic editor comprises an S. pyogenes (Spy) Cas9 cleavase, the first genomic editor or the base editor comprises an N. meningitidis (Nine) Cas9 nickase, the first gRNA targets the TRAC locus, the second gRNA targets the HLA-A locus, the third gRNA targets the CIITA locus, the fourth gRNA targets the HLA-B locus, the fifth gRNA targets the TRBC locus and the one or more additional gRNAs each targets a locus different from the TRAC locus, the HLA-A locus, the HLA-B locus, the CIITA locus, and the TRBC locus.

[0534] In some embodiments, the second genomic editor comprises an S. pyogenes (Spy) Cas9 cleavase, the first genomic editor or the base editor comprises an N. meningitidis (Nine) Cas9 nickase, the first gRNA targets the TRAC locus, the second gRNA targets the HLA-A locus, the third gRNA targets the CIITA locus, and the fourth gRNA targets the HLA-B locus, and the one or more additional gRNAs each targets a locus different from the TRAC locus, the HLA-A locus, the HLA-B locus, and the CIITA locus.

[0535] In some embodiments, the first gRNA comprises the sequence of SEQ ID NO: 374 or 378 or a sequence at least 95%, 90%, or 85% identical to SEQ ID NO: 374 or 378, wherein the second gRNA comprises the sequence of SEQ ID NO: 366 or 370 or a sequence at least 95%, 90%, or 85% identical to SEQ ID NO: 366 or 370, wherein the third gRNA comprises the sequence of SEQ ID NO: 345 or 384 or a sequence at least 95%, 90%, or 85% identical to SEQ ID NO: 345 or 384, and wherein the fourth gRNA comprises the sequence of SEQ ID NO: 363 or a sequence at least 95%, 90%, or 85% identical to SEQ ID NO: 363.

[0536] In some embodiments, the first genome editing tool, the second genome editing tool, and the gRNAs are collectively contained in at least 2, 3, 4, 5, 6, 7, 8, 9, or 10 distinct lipid nanoparticles (LNP) each comprising a distinct nucleic acid component. In some embodiments, the first genome editing tool, the second genome editing tool, and the gRNAs are collectively contained in 4, 5, 6, or 7 distinct lipid nanoparticles (LNP) each comprising a distinct nucleic acid component. In some embodiments, the first genome editing tool, the second genome editing tool, and the gRNAs are collectively contained in 4 distinct LNPs each comprising a distinct nucleic acid component. In some embodiments, the first genome editing tool, the second genome editing tool, and the gRNAs are collectively contained in 5 distinct LNPs each comprising a distinct nucleic acid component. In some embodiments, the first genome editing tool, the second genome editing tool, and the gRNAs are collectively contained in 6 distinct LNPs each comprising a distinct nucleic acid component. In some embodiments, the first genome editing tool, the second genome editing tool, and the gRNAs are collectively contained in 7 distinct LNPs each comprising a distinct nucleic acid component.

[0537] In some embodiments, the at least one gRNA that is cognate to the first genomic editor or the base editor and the at least one gRNA that is cognate to the second genomic editor collectively comprise at least 2 gRNAs, and wherein 2 of the gRNAs that target different genomic loci are contained in a same lipid nanoparticle (LNP). In some embodiments, the at least one gRNA that is cognate to the first genomic editor or the base editor and the at least one gRNA that is cognate to the second genomic editor collectively comprise at least 3 gRNAs, and wherein 3 of the gRNAs that target different genomic loci are contained in a same lipid nanoparticle. In some embodiments, the at least one gRNA that is cognate to the first genomic editor or the base editor and the at least one gRNA that is cognate to the second genomic editor collectively comprise at least 4 gRNAs, and wherein 4 of the gRNAs that target different genomic loci are contained in a same lipid nanoparticle.

[0538] In some embodiments, each of the other gRNAs is contained in a different LNP. In some embodiments, each one of the gRNAs is contained in a different LNP.

[0539] In some embodiments, the at least one gRNA that is cognate to the first genomic editor or the base editor comprises more than one gRNAs that target different genomic loci, and the first genomic editor or the base editor is contained in a same LNP with at least one of the more than one gRNAs. In some embodiments, the first genomic editor or the base editor and one of the gRNAs are contained in a same LNP. In some embodiments, the first genomic editor or the base editor and 2 of the gRNAs are contained in a same LNP.

[0540] In some embodiments, the first genomic editor or the base editor and 3 of the gRNAs are contained in a same LNP. In some embodiments, the first genomic editor or the base editor and 4 of the gRNAs are contained in a same LNP.

[0541] In some embodiments, the first genomic editor or the base editor is contained in a different LNP than each of the at least one gRNA that is cognate to the first genomic editor or the base editor.

[0542] In some embodiments, the at least one gRNA that is cognate to the first genomic editor or the base editor comprises more than one gRNAs that target different genomic loci, and each of the more than one gRNAs is contained in a different LNP.

[0543] In some embodiments, each of the LNPs comprising one of the gRNAs cognate to the first genomic editor or the base editor further comprises the first genomic editor or the base editor.

[0544] In some embodiments, the second genomic editor and the at least one gRNA that is cognate to the second genomic editor are contained in a same LNP. In some embodiments, the second genomic editor is contained in a same LNP with one of the gRNAs.

[0545] In some embodiments, the first genome editing tool comprises a uracil glycosylase inhibitor (UGI), and the UGI is contained in a different LNP than each one of the gRNAs.

[0546] In some embodiments, the LNPs comprise a first group of distinct LNPs, and a second group of distinct LNPs, and optionally, a third group of distinct LNPs. In some embodiments, the first group of distinct LNPs comprises 2, 3, 4, or 5 LNPs, the second group of distinct LNPs comprises 2, 3, 4, or 5 LNPs, and the third group of distinct LNPs, when present, comprises 2, 3, 4, or 5 LNPs. In some embodiments, the first group of distinct LNPs comprises 3 or 4 LNPs, the second group of distinct LNPs comprises 3 or 4 LNPs. In some embodiments, the first group of distinct LNPs, the second group of distinct LNPs, and the third group of distinct LNPs, when present, are delivered to the cell sequentially. In some embodiments, the second group of distinct LNPs is delivered to the cell 1, 2, or 3 days after the first group of distinct LNPs is delivered to the cell, and wherein the third group of distinct LNPs, when present, is delivered to the cell 1, 2, or 3 days after the second group of distinct LNPs is delivered to the cell.

[0547] In some embodiments, the first genome editing tool, the second genome editing tool, and the gRNAs are collectively contained in: (a) (i) a first lipid nanoparticle (LNP) comprising a uracil glycosylase inhibitor (UGI); (ii) a second LNP comprising the first genomic editor or the base editor and comprising a second gRNA; (iii) a third LNP comprising the first genomic editor or the base editor and comprising a third gRNA; and (iv) a fourth LNP comprising the first genomic editor or the base editor and comprising a fourth gRNA; and (b) (i) a fifth LNP comprising a uracil glycosylase inhibitor (UGI); (ii) a sixth LNP comprising the second genomic editor and a first gRNA; (iii) a nucleic acid encoding an exogenous gene for insertion at an editing site of the first gRNA; (iv) optionally a seventh LNP comprising the first genomic editor or the base editor and comprising a fifth gRNA; (v) optionally an eighth LNP comprising the first genomic editor or the base editor and comprising a sixth gRNA; (vi) optionally a ninth LNP comprising the first genomic editor or the base editor and comprising a seventh gRNA.

E. Contacting Cells with LNP

[0548] In some embodiments, the LNP is pretreated with a serum factor before contacting the cell. In some embodiments, the LNP is pretreated with a primate serum factor before contacting the cell. In some embodiments, the LNP is pretreated with a human serum factor before contacting the cell. In some embodiments, the LNP is pretreated with ApoE before contacting the cell. In some embodiments, the LNP is pretreated with a recombinant ApoE3 or ApoE4 before contacting the cell. In some embodiments, the cell is serum-starved prior to contact with the LNP.

[0549] In some embodiments, the multiplex methods comprise preincubating a serum factor and the LNP for about 30 seconds to overnight. In some embodiments, the preincubation step comprises preincubating a serum factor and the LNP for about 1 minute to 1 hour. In some embodiments, it comprises preincubating for about 1-30 minutes. In other embodiments, it comprises preincubating for about 1-10

[0550] In some embodiments, the LNP compositions are administered sequentially. In some embodiments, the LNP compositions are administered simultaneously. In some embodiments, the population of cells is contacted with 2-12 LNP compositions. In some embodiments, the population of cells is contacted with 2-8 LNP compositions. In some embodiments, the population of cells is contacted with 2-6 LNP compositions. In some embodiments, the population of cells is contacted with 3-8 LNP compositions. In some embodiments, the population of cells is contacted with 3-6 LNP compositions. In some embodiments, the population of cells is contacted with 4-6 LNP compositions. In some embodiments, the population of cells is contacted with 6-12 LNP compositions. In some embodiments, the population of cells is contacted with 3 LNP compositions. In some embodiments, the population of cells is contacted with 4 LNP compositions. In some embodiments, the population of cells is contacted with 6 LNP compositions. In some embodiments, the population of cells is contacted with 3 LNP compositions. In some embodiments, the population of cells is contacted with the LNP compositions simultaneously.

[0551] In some embodiments, the population of cells is contacted with no more than 6 LNP compositions simultaneously. In some embodiments, the population of cells is contacted with no more than 2 LNP compositions simultaneously.

[0552] In some embodiments, the cells are frozen between sequential contacting or editing steps.

[0553] In some embodiments, the LNP is pretreated with a serum factor before contacting the cell. In some embodiments, the LNP is pretreated with a human serum before contacting the cell. In some embodiments, the LNP is pretreated with a serum replacement, e.g., a commercially available serum replacement, preferably wherein the serum replacement is appropriate for ex vivo use. In some embodiments, the LNP is pretreated with ApoE before contacting the cell. In some embodiments, the LNP is pretreated with a recombinant ApoE3 or ApoE4 before contacting the cell. In some embodiments, the cell is serum-starved prior to contact with the LNP.

[0554] In some embodiments, the multiplex methods comprise preincubating a serum factor and the LNP for about 30 seconds to overnight. In some embodiments, the preincubation step comprises preincubating a serum factor and the LNP for about 1 minute to 1 hour. In some embodiments, it comprises preincubating for about 1-30 minutes. In other embodiments, it comprises preincubating for about 1-10 minutes. Still further embodiments comprise preincubating for about 5 minutes.

[0555] In some embodiments, the preincubating step occurs at about 4° C. In some embodiments, the preincubating step occurs at about 25° C. In some embodiments, the preincubating step occurs at about 37° C. The preincubating step may comprise a buffer such as sodium bicarbonate or HEPES.

[0556] In some embodiments, a LNP is provided to a “non-activated” cell. A “non-activated” cell refers to a cell that has not been stimulated in vitro. In some embodiments, a “non-activated” T cell may have been stimulated in vivo (e.g., by antigen) while in the body, however said cell may be referred to as non-activated herein if said cell has not been stimulated in vitro in culture. An “activated” cell is also useful in the methods disclosed herein and can refer to a cell that has been stimulated in vitro. Agents for activating cells in vitro are provided herein and are known in the art, particularly for activation of T cells or B cells.

[0557] In some embodiments, a T cell is cultured in culture medium prior to contact with a LNP. In some embodiments, the T cell is cultured with one or more proliferative cytokines, for example one or more or all of IL-2, IL-15, IL-7, and IL-21, or one or more agents that provides activation through CD3 or CD28.

[0558] In some embodiments, the T cell is activated prior to contact with a LNP, is activated in between contact with LNPs, or is activated after contact with a LNP.

[0559] In some embodiments, the cell is a T cell and the method further comprises an activation step between a first and a second contacting step. In some embodiments, a non-activated T cell is contacted with one, two, or three nucleic acid assembly compositions. In some embodiments, an activated T cell is contacted with one to 8 LNPs, optionally 1 to 4 LNPs. In some embodiments, the T cell is contacted with at least 6 LNPs. In some embodiments, the T cell is contacted with no more than 12 LNPs. In some embodiments, the T cell is contacted with 2-12 LNPs. In some embodiments, the T cell is contacted with 2-8 LNPs. In some embodiments, the T cell is contacted with 2-6 LNPs. In some embodiments, the T cell is contacted with 3-8 LNPs. In some embodiments, the T cell is contacted with 3-6 LNPs. In some embodiments, the T cell is contacted with 4-6 LNPs. In some embodiments, the T cell is contacted with 4-12 LNPs. In some embodiments, the T cell is contacted with 4-8 LNPs. In some embodiments, the T cell is contacted with 6-12 LNPs. In some embodiments, the T cell is contacted with 3, 4, 5, or 6 LNPs. In some embodiments, the T cell is contacted with no more than 8 LNPs simultaneously. In some embodiments, the T cell is contacted with no more than 6 LNPs simultaneously. In some embodiments, the activated T cell is contacted with at least 6 LNPs. In some embodiments, the activated T cell is contacted with no more than 12 LNPs. In some embodiments, the activated T cell is contacted with 2-12 LNPs. In some embodiments, the activated T cell is contacted with 4-12 LNPs. In some embodiments, the activated T cell is contacted with 4-8 LNPs. In some embodiments, the activated T cell is contacted with no more than 8 LNPs simultaneously. In some embodiments, the activated T cell is contacted with no more than 6 LNPs simultaneously.

### VIII. FURTHER EXEMPLARY EMBODIMENTS

[0560] While the invention is described in conjunction with the illustrated embodiments, it is understood that they are not intended to limit the invention to those embodiments. On the contrary, the invention is intended to cover all alternatives, modifications, and equivalents, including equivalents of specific features, which may be included within the invention as defined by the appended claims.

[0561] Both the foregoing general description and detailed description, as well as the following examples, are exemplary and explanatory only and are not restrictive of the teachings. The section headings used herein are for organizational purposes only and are not to be construed as limiting the desired subject matter in any way. In the event that any literature incorporated by reference contradicts any term defined in this specification, this specification controls. All ranges given in the application encompass the endpoints unless stated otherwise.

### IX. EXAMPLES

### Example 1. Materials and Methods

### Example 1.1. Next-Generation Sequencing (“NGS”) and Analysis for On-Target Cleavage Efficiency

[0562] Genomic DNA was extracted using QuickExtract™ DNA Extraction Solution (Lucigen, Cat. No. QE09050) according to manufacturer's protocol.

[0563] To quantitatively determine the efficiency of editing at the target location in the genome, deep sequencing was utilized to identify the presence of insertions, deletions, and substitution introduced by gene editing. PCR primers were designed around the target site within the gene of interest (e.g., HLA-A) and the genomic area of interest was amplified. Primer sequence design was done as is standard in the field.

[0564] Additional PCR was performed according to the manufacturer's protocols (Illumina) to add chemistry for sequencing. The amplicons were sequenced on an Illumina MiSeq instrument. The reads were aligned to the human reference genome (e.g., hg38) after eliminating those having low quality scores. Reads that overlapped the target region of interest were re-aligned to the local genome sequence to improve the alignment. Then the number of wild type reads versus the number of reads which contain C-to-T mutations, C-to-A/G mutations or indels was calculated. Insertions and deletions were scored in a 20 bp region centered on the predicted Cas9 cleavage site. Indel percentage is defined as the total number of sequencing reads with one or more base inserted or deleted within the 20 bp scoring region divided by the total number of sequencing reads, including wild type. C-to-T mutations or C-to-A/G mutations were scored in a 40 bp region including 10 bp upstream and 10 bp downstream of the 20 bp sgRNA target sequence. The C-to-T editing percentage is defined as the total number of sequencing reads with either one or more C-to-T mutations within the 40 bp region divided by the total number of sequencing reads, including wild type. The percentage of C-to-A/G mutations are calculated similarly.

### Example 1.2. Preparation of Lipid Nanoparticles

[0565] The lipid components were dissolved in 100% ethanol at various molar ratios. The RNA cargos (e.g., Cas9 mRNA and sgRNA) were dissolved in 25 mM citrate buffer, 100 mM NaCl, pH 5.0, resulting in a concentration of RNA cargo of approximately 0.45 mg/mL.

[0566] The lipid nucleic acid assemblies contained ionizable Lipid A ((9Z,12Z)-3-((4,4-bis(octyloxy)butanoyl)oxy)-2-((((3-(diethylamino)propoxy)carbonyl)oxy)methyl)propyl octadeca-9,12-dienoate, also called 3-((4,4-bis(octyloxy)butanoyl)oxy)-2-((((3-(diethylamino)propoxy)carbonyl)oxy)methyl)propyl (9Z,12Z)-octadeca-9,12-dienoate), cholesterol, DSPC, and PEG2k-DMG in molar ratios listed in examples below. The lipid nucleic acid assemblies were formulated with a lipid amine to RNA phosphate (N:P) molar ratio of about 6, and a ratio of gRNA to mRNA of 1:1 or 1:2 by weight.

[0567] Lipid nanoparticles (LNP compositions) were prepared using a cross-flow technique utilizing impinging jet mixing of the lipid in ethanol with two volumes of RNA solutions and one volume of water. The lipids in ethanol were mixed through a mixing cross with the two volumes of RNA solution. A fourth stream of water was mixed with the outlet stream of the cross through an inline tee (See WO2016010840, FIG. 2). The LNP compositions were held for 1 hour at room temperature (RT), and further diluted with water (approximately 1:1 v/v). LNP compositions were concentrated using tangential flow filtration on a flat sheet cartridge (Sartorius, 100 kD MWCO) and buffer exchanged using PD-10 desalting columns (GE) into 50 mM Tris, 45 mM NaCl, 5% (w/v) sucrose, pH 7.5 (TSS). Alternatively, the LNP's were optionally concentrated using 100 kDa Amicon spin filter and buffer exchanged using PD-10 desalting columns (GE) into TSS. The resulting mixture was then filtered using a 0.2 μm sterile filter. The final LNP was stored at 4° C. or −80° C. until further use.

### Example 1.3. In Vitro Transcription (“IVT”) of mRNA

[0568] Capped and polyadenylated mRNA containing N1-methyl pseudo-U was generated by in vitro transcription using a linearized plasmid DNA template and T7 RNA polymerase. Plasmid DNA containing a T7 promoter, a sequence for transcription, and a polyadenylation sequence was linearized by incubating at 37° C. for 2 hours with XbaI with the following conditions: 200 ng/μL plasmid, 2 U/μL XbaI (NEB), and 1× reaction buffer. The XbaI was inactivated by heating the reaction at 65° C. for 20 minutes. The linearized plasmid was purified from enzyme and buffer salts. The IVT reaction to generate modified mRNA was performed by incubating at 37° C. for 1.5-4 hours in the following conditions: 50 ng/μL linearized plasmid; 2-5 mM each of GTP, ATP, CTP, and N1-methyl pseudo-UTP (Trilink); 10-25 mM ARCA (Trilink); 5 U/μL T7 RNA polymerase (NEB); 1 U/μL Murine RNase inhibitor (NEB); 0.004 U/μL Inorganic E. coli pyrophosphatase (NEB); and 1× reaction buffer. TURBO DNase (ThermoFisher) was added to a final concentration of 0.01 U/μL, and the reaction was incubated for an additional 30 minutes to remove the DNA template. The mRNA was purified using a MegaClear Transcription Clean-up kit (ThermoFisher) or a RNeasy Maxi kit (Qiagen) per the manufacturers' protocols. Alternatively, the mRNA was purified through a precipitation protocol, which in some cases was followed by HPLC-based purification. Briefly, after the DNase digestion, mRNA is purified using LiCl precipitation, ammonium acetate precipitation and sodium acetate precipitation. For HPLC purified mRNA, after the LiCl precipitation and reconstitution, the mRNA was purified by RP-IP HPLC (see, e.g., Kariko, et al. Nucleic Acids Research, 2011, Vol. 39, No. 21 e142). The fractions chosen for pooling were combined and desalted by sodium acetate/ethanol precipitation as described above. In a further alternative method, mRNA was purified with a LiCl precipitation method followed by further purification by tangential flow filtration. RNA concentrations were determined by measuring the light absorbance at 260 nm (Nanodrop), and transcripts were analyzed by capillary electrophoresis by Bioanlayzer (Agilent).

[0569] Streptococcus pyogenes (“Spy”) Cas9 mRNA was generated from plasmid DNA encoding an open reading frame according to SEQ ID NO: 307 (see sequences in Table of Sequences). Sp BC22n mRNA was generated from plasmid DNA encoding an open reading frame according to SEQ ID NO: 306. UGI mRNA was generated from plasmid DNA encoding an open reading frame according to SEQ ID NOs: 309. Nesseria meningitidis (Nme2) Cas9 mRNA was generated from plasmid DNA encoding an open reading frame according to SEQ ID NO: 305. Nme2 BC22n mRNA was generated from plasmid DNA encoding an open reading frame according to SEQ ID NO: 308. With respect to RNAs, it is understood that Ts should be replaced with Us (which were N1-methyl pseudouridines as described above). Messenger RNAs used in the Examples include a 5′ cap and a 3′ polyadenylation region, e.g., up to 100 nts, and are described, for example, in SEQ ID NO: 147 in Table of Sequences. Guide RNAs were chemically synthesized by methods known in the art.

### Example 2. One Pot Methods Using Electroporation

[0570] A solution containing a mixture of corresponding mRNAs encoding either SpBC22n (SEQ ID NO: 306) and UGI (SEQ ID NO: 309) or Nme2BC22n (SEQ ID NO: 308) and UGI (SEQ ID NO: 309) with or without Spy Cas9 (SEQ ID NO: 307) or Nme2 Cas9 (SEQ ID NO: 305) mRNAs was prepared in P3 buffer. Each guide used in this study was initially heat denatured at 95° C. for 2 minutes followed by 5 minute incubation at room temperature and cooled on ice. Healthy human donor apheresis was obtained commercially (Hemacare). T cells were isolated by negative selection using the EasySep Human T cell Isolation Kit (Stemcell Technology, Cat. 17951) following manufacturer's instruction. T cells were cryopreserved in Cryostor CS10 freezing media (Stemcell, Cat. 07930) for future use. Beginning of this study (Day 0), cryopreserved T cells were thawed and cultured overnight in 1× cytokine T cell growth media consisting of CTS OpTmizer SFM (Gibco, A3705001) with IL-15 (5 ng/mL), IL-7 (5 ng/mL), and IL-2 (200 U/mL). Following day, T cells were activated through Transact (Miltenyi, Cat. 130-111-160).

[0571] Forty-eight hours post activation, T cells were harvested, centrifuged, and resuspended in P3 electroporation buffer (Lonza). For each well to be electroporated, 1×10\hat{ }5 T cells were mixed reagents as indicated in Tables 6 and 7. Where indicated, samples received 160 ng of mRNA encoding a Cas9 or base editor (BE), 160 ng of mRNA encoding UGI and 2 uM of each sgRNA in a final volume of 20 μL of P3 electroporation buffer. This mixture was electroporated using the manufacturer's pulse code. Electroporated T cells were immediately rested in T cell basal media without cytokines for 10 minutes before being washed and resuspended in 100 μL of T cell basal media with with IL15 (5 ng/mL), IL7 (5 ng/mL), and IL2 (200 U/mL) and with 0.5 uM Compound 1.

[0572] Compound 1 is a small molecule inhibitor of DNA-dependent protein kinase. The inhibitor is 9-(4,4-difluorocyclohexyl)-7-methyl-2-((7-methyl-[1,2,4]triazolo[1,5-a]pyridin-6-yl)amino)-7,9-dihydro-8H-purin-8-one, also depicted as:

[chemical structure]

DNAPKI Compound 1 was prepared as follows:

### General Information

[0573] All reagents and solvents were purchased and used as received from commercial vendors or synthesized according to cited procedures. All intermediates and final compounds were purified using flash column chromatography on silica gel. NMR spectra were recorded on a Bruker or Varian 400 MHz spectrometer, and NMR data were collected in CDCl3 at ambient temperature. Chemical shifts are reported in parts per million (ppm) relative to CDCl3 (7.26). Data for 1H NMR are reported as follows: chemical shift, multiplicity (br=broad, s=singlet, d=doublet, t=triplet, q=quartet, dd=doublet of doublets, dt=doublet of triplets m=multiplet), coupling constant, and integration. MS data were recorded on a Waters SQD2 mass spectrometer with an electrospray ionization (ESI) source. Purity of the final compounds was determined by UPLC-MS-ELS using a Waters Acquity H-Class liquid chromatography instrument equipped with SQD2 mass spectrometer with photodiode array (PDA) and evaporative light scattering (ELS) detectors.

### Intermediate 1a: (E)-N,N-dimethyl-N′-(4-methyl-5-nitropyridin-2-yl)formimidamide

[chemical structure]

[0574] To a solution of 4-methyl-5-nitro-pyridin-2-amine (5 g, 1.0 equiv.) in toluene (0.3 M) was added DMF-DMA (3.0 equiv.). The mixture was stirred at 110° C. for 2 h. The reaction mixture was concentrated under reduced pressure to give a residue and purified by column chromatography to afford product as a yellow solid (59%). ¹H NMR (400 MHz, (CD₃)₂SO) δ 8.82 (s, 1H), 8.63 (s, 1H), 6.74 (s, 1H), 3.21 (m, 6H).

### Intermediate 1b: (E)-N-hydroxy-N′-(4-methyl-5-nitropyridin-2-yl)formimidamide

[chemical structure]

[0575] To a solution of Intermediate 1a (4 g, 1.0 equiv.) in MeOH (0.2 M) was added NH₂OH·HCl (2.0 equiv.). The reaction mixture was stirred at 80° C. for 1 h. The reaction mixture was filtered, and the filtrate was concentrated under reduced pressure to give a residue. The residue was partitioned between H₂O and EtOAc, followed by 2× extraction with EtOAc. The organic phases were concentrated under reduced pressure to give a residue and purified by column chromatography to afford product as a white solid (66%). 1H NMR (400 MHz, (CD₃)₂SO) δ 10.52 (d, J=3.8 Hz, 1H), 10.08 (dd, J=9.9, 3.7 Hz, 1H), 8.84 (d, J=3.8 Hz, 1H), 7.85 (dd, J=9.7, 3.8 Hz, 1H), 7.01 (d, J=3.9 Hz, 1H), 3.36 (s, 3H).

### Intermediate 1c: 7-methyl-6-nitro-[1,2,4]triazolo[1,5-a]pyridine

[chemical structure]

[0576] To a solution of Intermediate 1b (2.5 g, 1.0 equiv.) in THF (0.4 M) was added trifluoroacetic anhydride (1.0 equiv.) at 0° C. The mixture was stirred at 25° C. for 18 h. The reaction mixture was filtered, and the filtrate was concentrated under reduced pressure to give a residue. The residue was purified by column chromatography to afford product as a white solid (44%). ¹H NMR (400 MHz, CDCl3) δ 9.53 (s, 1H), 8.49 (s, 1H), 7.69 (s, 1H), 2.78 (d, J=1.0 Hz, 3H).

### Intermediate 1d: 7-methyl-[1,2,4]triazolo[1,5-a]pyridin-6-amine

[chemical structure]

[0577] To a mixture of Pd/C (10% w/w, 0.2 equiv.) in EtOH (0.1 M) was added Intermediate 1c (1.0 equiv. and ammonium formate (5.0 equiv.). The mixture was heated at 105° C. for 2 h. The reaction mixture was filtered, and the filtrate was concentrated under reduced pressure to give a residue. The residue was purified by column chromatography to afford product as a pale brown solid. ¹H NMR (400 MHz, (CD₃)₂SO) δ 8.41 (s, 2H), 8.07 (d, J=9.0 Hz, 2H), 7.43 (s, 1H), 2.22 (s, 3H).

### Intermediate 1e: 8-methylene-1,4-dioxaspiro[4.5]decane

[chemical structure]

[0578] To a solution of methyl(triphenyl)phosphonium bromide (1.15 equiv.) in THF (0.6 M) was added n-BuLi (1.1 equiv.) at −78° C. dropwise, and the mixture was stirred at 0° C. for 1 h. Then, 1,4-dioxaspiro[4.5]decan-8-one (50 g, 1.0 equiv.) was added to the reaction mixture. The mixture was stirred at 25° C. for 12 h. The reaction mixture was poured into aq. NH₄Cl at 0° C., diluted with H₂O, and extracted 3× with EtOAc. The combined organic layers were concentrated under reduced pressure to give a residue and purified by column chromatography to afford product as a colorless oil (51%). ¹H NMR (400 MHz, CDCl₃) δ 4.67 (s, 1H), 3.96 (s, 4H), 2.82 (t, J=6.4 Hz, 4H), 1.70 (t, J=6.4 Hz, 4H).

### Intermediate 1f: 7,10-dioxadispiro[2.2.4⁶.2³]dodecane

[chemical structure]

[0579] To a solution of Intermediate 4a (5 g, 1.0 equiv.) in toluene (3 M) was added ZnEt2 (2.57 equiv.) dropwise at −40° C. and the mixture was stirred at −40° C. for 1 h. Then diiodomethane (6.0 equiv.) was added dropwise to the mixture at −40° C. under N2. The mixture was then stirred at 20° C. for 17 h under N₂ atmosphere. The reaction mixture was poured into aq. NH₄Cl at 0° C. and extracted 2× with EtOAc. The combined organic phases were washed with brine (20 mL), dried with anhydrous Na₂SO₄, filtered, and the filtrate was concentrated in vacuum. The residue was purified by column chromatography to afford product as a pale yellow oil (73%).

### Intermediate 1g: spiro[2.5]octan-6-one

[chemical structure]

[0580] To a solution of Intermediate 4b (4 g, 1.0 equiv.) in 1:1 THF/H₂O (1.0 M) was added TFA (3.0 equiv.). The mixture was stirred at 20° C. for 2 h under N₂ atmosphere. The reaction mixture was concentrated under reduced pressure to remove THF, and the residue adjusted pH to 7 with 2 M NaOH (aq.). The mixture was poured into water and 3× extracted with EtOAc. The combined organic phase was washed with brine, dried with anhydrous Na₂SO₄, filtered, and the filtrate was concentrated in vacuum. The residue was purified by column chromatography to afford product as a pale yellow oil (68%). ¹H NMR (400 MHz, CDCl₃) δ 2.35 (t, J=6.6 Hz, 4H), 1.62 (t, J=6.6 Hz, 4H), 0.42 (s, 4H).

### Intermediate 1h: N-(4-methoxybenzyl)spiro[2.5]octan-6-amine

[chemical structure]

[0581] To a mixture of Intermediate 4c (2 g, 1.0 equiv.) and (4-methoxyphenyl)methanamine (1.1 equiv.) in DCM (0.3 M) was added AcOH (1.3 equiv.). The mixture was stirred at 20° C. for 1 h under N₂ atmosphere. Then, NaBH(OAc)₃ (3.3 equiv.) was added to the mixture at 0° C., and the mixture was stirred at 20° C. for 17 h under N₂ atmosphere. The reaction mixture was concentrated under reduced pressure to remove DCM, and the resulting residue was diluted with H₂O and extracted 3× with EtOAc. The combined organic layers were washed with brine, dried over Na₂SO₄, filtered, and the filtrate was concentrated under reduced pressure to give a residue. The residue was purified by column chromatography to afford product as a gray solid (51%). ¹H NMR (400 MHz, (CD₃)₂SO) δ 7.15-7.07 (m, 2H), 6.77-6.68 (m, 2H), 3.58 (s, 3H), 3.54 (s, 2H), 2.30 (ddt, J=10.1, 7.3, 3.7 Hz, 1H), 1.69-1.62 (m, 2H), 1.37 (td, J=12.6, 3.5 Hz, 2H), 1.12-1.02 (m, 2H), 0.87-0.78 (m, 2H), 0.13-0.04 (m, 2H).

### Intermediate 1i: spiro[2.5]octan-6-amine

[chemical structure]

[0582] To a suspension of Pd/C (10% w/w, 1.0 equiv.) in MeOH (0.25 M) was added Intermediate 4d (2 g, 1.0 equiv.) and the mixture was stirred at 80° C. at 50 Psi for 24 h under H₂ atmosphere. The reaction mixture was filtered, and the filtrate was concentrated under reduced pressure to give a residue that was purified by column chromatography to afford product as a white solid. ¹H NMR (400 MHz, (CD₃)₂SO) δ 2.61 (tt, J=10.8, 3.9 Hz, 1H), 1.63 (ddd, J=9.6, 5.1, 2.2 Hz, 2H), 1.47 (td, J=12.8, 3.5 Hz, 2H), 1.21-1.06 (m, 2H), 0.82-0.72 (m, 2H), 0.14-0.05 (m, 2H).

### Intermediate 1j: ethyl 2-chloro-4-(spiro[2.5]octan-6-ylamino)pyrimidine-5-carboxylate

[chemical structure]

[0583] To a mixture of ethyl 2,4-dichloropyrimidine-5-carboxylate (2.7 g, 1.0 equiv.) and Intermediate 1i (1.0 equiv.) in ACN (0.5-0.6 M) was added K₂CO₃ (2.5 equiv.) in one portion under N₂. The mixture was stirred at 20° C. for 12 h. The reaction mixture was filtered, and the filtrate was concentrated under reduced pressure to give a residue. The residue was purified by column chromatography to afford product as a white solid (54%). ¹H NMR (400 MHz, (CD₃)₂SO) δ 8.64 (s, 1H), 8.41 (d, J=7.9 Hz, 1H), 4.33 (q, J=7.1 Hz, 2H), 4.08 (d, J=9.8 Hz, 1H), 1.90 (dd, J=12.7, 4.8 Hz, 2H), 1.64 (t, J=12.3 Hz, 2H), 1.52 (q, J=10.7, 9.1 Hz, 2H), 1.33 (t, J=7.1 Hz, 3H), 1.12 (d, J=13.0 Hz, 2H), 0.40-0.21 (m, 4H).

### Intermediate 1k: 2-chloro-4-(spiro[2.5]octan-6-ylamino)pyrimidine-5-carboxylic acid

[chemical structure]

[0584] To a solution of Intermediate 1j (2 g, 1.0 equiv.) in 1:1 THF/H₂O (0.3 M) was added LiOH (2.0 equiv.). The mixture was stirred at 20° C. for 12 h. The reaction mixture was filtered, and the filtrate was concentrated under reduced pressure to give a residue. The residue was adjusted to pH 2 with 2 M HCl, and the precipitate was collected by filtration, washed with water, and tried under vacuum. Product was used directly in the next step without additional purification (82%). ¹H NMR (400 MHz, (CD₃)₂SO) δ 13.54 (s, 1H), 8.38 (d, J=8.0 Hz, 1H), 8.35 (s, 1H), 3.82 (qt, J=8.2, 3.7 Hz, 1H), 1.66 (dq, J=12.8, 4.1 Hz, 2H), 1.47-1.34 (m, 2H), 1.33-1.20 (m, 2H), 0.86 (dt, J=13.6, 4.2 Hz, 2H), 0.08 (dd, J=8.3, 4.8 Hz, 4H).

### Intermediate 1l: 2-chloro-9-(spiro[2.5]octan-6-yl)-7,9-dihydro-8H-purin-8-one

[chemical structure]

[0585] To a mixture of Intermediate 1k (1.5 g, 1.0 equiv.) and Et₃N (1.0 equiv.) in DMF (0.3 M) was added DPPA (1.0 equiv.). The mixture was stirred at 120° C. for 8 h under N₂ atmosphere. The reaction mixture was poured into water. The precipitate was collected by filtration, washed with water, and dried under vacuum to give a residue that was used directly in the next step without additional purification (67%). ¹H NMR (400 MHz, (CD₃)₂SO) δ 11.68 (s, 1H), 8.18 (s, 1H), 4.26 (ddt, J=12.3, 7.5, 3.7 Hz, 1H), 2.42 (qd, J=12.6, 3.7 Hz, 2H), 1.95 (td, J=13.3, 3.5 Hz, 2H), 1.82-1.69 (m, 2H), 1.08-0.95 (m, 2H), 0.39 (tdq, J=11.6, 8.7, 4.2, 3.5 Hz, 4H).

### Intermediate 1m: 2-chloro-7-methyl-9-(spiro[2.5]octan-6-yl)-7,9-dihydro-8H-purin-8-one

[chemical structure]

[0586] To a mixture of Intermediate 1l (1.0 g, 1.0 equiv.) and NaOH (5.0 equiv.) in 1:1 THF/H₂O (0.3-0.5 M) was added Mel (2.0 equiv.). The mixture was stirred at 20° C. for 12 h under N₂ atmosphere. The reaction mixture was concentrated under reduced pressure to afford a residue that was purified by column chromatography to afford product as a pale yellow solid (67%). ¹H NMR (400 MHz, CDCl₃) δ 7.57 (s, 1H), 4.03 (tt, J=12.5, 3.9 Hz, 1H), 3.03 (s, 3H), 2.17 (qd, J=12.6, 3.8 Hz, 2H), 1.60 (td, J=13.4, 3.6 Hz, 2H), 1.47-1.34 (m, 2H), 1.07 (s, 1H), 0.63 (dp, J=14.0, 2.5 Hz, 2H), −0.05 (s, 4H).

### DNAPKI Compound 4: 7-methyl-2-((7-methyl-[1,2,4]triazolo[1,5-a]pyridin-6-yl)amino)-9-(spiro[2.5]octan-6-yl)-7,9-dihydro-8H-purin-8-one

[chemical structure]

[0587] To a mixture of Intermediate 1m (1.0 equiv.) and Intermediate 1d (1.0 equiv.), Pd(dppf)Cl₂ (0.2 equiv.), XantPhos (0.4 equiv.), and Cs₂CO₃ (2.0 equiv.) in DMF (0.2-0.3 M) was degassed and purged 3× with N₂, and the mixture was stirred at 130° C. for 12 h under N₂ atmosphere. The mixture was then poured into water and extracted 3× with DCM. The combined organic phase was washed with brine, dried over Na₂SO₄, filtered, and the filtrate was concentrated in vacuum. The residue was purified by column chromatography to afford product as an off-white solid. ¹H NMR (400 MHz, (CD₃)₂SO) δ 9.09 (s, 1H), 8.73 (s, 1H), 8.44 (s, 1H), 8.16 (s, 1H), 7.78 (s, 1H), 4.21 (t, J=12.5 Hz, 1H), 3.36 (s, 3H), 2.43 (s, 3H), 2.34 (dt, J=13.0, 6.5 Hz, 2H), 1.93-1.77 (m, 2H), 1.77-1.62 (m, 2H), 0.91 (d, J=13.2 Hz, 2H), 0.31 (t, J=7.1 Hz, 2H). MS: 405.5 m/z [M+H].

[0588] Cells treated with AAV received 3×10\hat{ }5 multiplicity of infection (MOI) of AAV6 encoding a TCR flanked by homology arms designed to the SpCas9 G013006 cut site (SEQ ID NO: 297). On the following day, an additional 100 μL of T cell basal media with cytokines were added to the T cells. Electroporated T cells were subsequently cultured for 4 additional days and cell pellets were collected for NGS sequencing as described in Example 1. On day 10 post-thaw, T cells were phenotyped by flow cytometry to determine if editing resulted in loss of cell surface proteins.

TABLE 6
Editing treatments

| Treatment | sgRNA | mRNA |
|---|---|---|
| Nme2 Cas9 | G021469 TRAC | SEQ ID No: 305 |
| Sp Cas9 | G013006 TRAC | SEQ ID No.: 307 |
| Nme2 Base | G028935 TRAC | Base editor SEQ ID No: 308 |
| Editor | G028986 TRBC | UGI SEQ ID No: 309 |
| | G028907 HLA-A | |
| Sp Base | G023520 TRAC | Base editor SEQ ID No: 306 |
| Editor | G023524 TRBC | UGI SSEQ ID No: 309 |
| | G023523 HLA-A | |

[0589] For flow cytometric analysis, cells were washed in FACS buffer (PBS+2% FBS+2 mM EDTA). Engineered T cells were incubated in a cocktail of antibodies targeting HLA-A2 (Biolegend, 343320), CD3 (Biolegend, 300430), CD4 (Biolegend, 317434), CD8 (Biolegend, 301046), Vb8 (Biolegend, 348104) and ViaKrome 808 Fixable Viability Dye (Beckman Coulter, C36628). T cells were subsequently washed and analyzed on a Cytoflex instrument (Beckman Coulter). Data analysis was performed using FlowJo software package (v.10.6.1). T cells were gated on size, viability, CD4 or CD8 expression, and expression of markers indicated in Table 7. Flow cytometry data in Table 7 and FIGS. 1A-2C show all cells with disrupted endogenous TRAC, TRBC1 or TRBC2 loci, represented as the percentage of cells that are not CD₃+Vb8−. Similarly, flow cytometry data in Table 7 and FIGS. 2A-2C show base editing that has disrupted HLA-A2 expression. The percentage of cells expressing the transgenic TCR (Vb8+) are shown in Table 7 and FIGS. 3A-3C. The results of the NGS data shown in Table 8 and FIGS. 4A-4H also show editing in TRAC, TRBC1 and TRBC2 loci when orthogonal Cas9 species were used.

TABLE 7
Mean percent of T cells displaying cell surface phenotype

| | | Donor 45127 | | Donor 3410 | | Donor 3786 | |
|---|---|---|---|---|---|---|---|
| Marker | Treatment | Mean | SD | Mean | SD | Mean | SD |
| HLA-A- | No RNA, No AAV | 3.11 | 1.01 | 2.41 | 0.77 | 0.31 | 0.32 |
| | AAV only | 1.28 | 1.33 | 3.52 | 2.66 | 0.50 | 0.18 |
| | Nme2 BE no guides | 0.58 | 0.39 | 5.73 | 2.02 | 0.18 | 0.16 |
| | Spy BE no guides | 0.64 | 0.47 | 1.46 | 1.04 | 0.19 | 0.16 |
| | Nme2Cas9 | 3.32 | 3.22 | 2.55 | 2.51 | 0.35 | 0.31 |
| | SpyCas9 | 3.28 | 3.75 | 2.43 | 1.16 | 0.37 | 0.31 |
| | Nme2Cas9 + AAV | 5.48 | 5.45 | 1.62 | 1.31 | 0.00 | 0.00 |
| | SpyCas9 + AAV | 3.94 | 4.05 | 1.26 | 1.64 | 0.28 | 0.49 |
| | Nme2 BE | 91.18 | 3.72 | 85.81 | 3.25 | 87.66 | 2.35 |
| | Nme2 BE + Nme2Cas9 | 86.95 | 4.04 | 76.65 | 0.97 | 85.61 | 2.58 |
| | Nme2 BE + SpyCas9 | 92.14 | 1.76 | 77.24 | 12.68 | 84.80 | 1.98 |
| | Nme2 BE + Nme2Cas9 + AAV | 96.17 | 0.86 | 89.47 | 3.07 | 91.14 | 2.99 |
| | Nme2 BE + SpyCas9 + AAV | 96.83 | 0.52 | 94.57 | 2.28 | 91.23 | 0.66 |
| | Spy BE | 96.17 | 0.35 | 93.77 | 2.33 | 96.37 | 0.72 |
| | Spy BE + Nme2Cas9 | 96.85 | 0.86 | 89.84 | 3.15 | 91.58 | 3.17 |
| | Spy BE + SpyCas9 | 88.39 | 3.19 | 90.08 | 2.81 | 85.05 | 4.59 |
| | Spy BE + Nme2Cas9 + AAV | 99.13 | 0.60 | 98.18 | 0.70 | 99.52 | 0.28 |
| | Spy BE + SpyCas9 + AAV | 95.90 | 3.57 | 94.33 | 6.33 | 85.08 | 15.10 |
| 100− | No RNA, No AAV | 5.43 | 1.57 | 8.77 | 4.76 | 4.90 | 0.53 |
| (CD3+ | AAV only | 5.47 | 2.10 | 8.93 | 1.12 | 5.59 | 0.19 |
| Vb8−) | Nme2 BE no guides | 4.95 | 0.87 | 7.37 | 0.87 | 5.20 | 0.80 |
| | Spy BE no guides | 5.06 | 0.68 | 6.30 | 0.28 | 4.60 | 0.71 |
| | Nme2Cas9 | 95.40 | 0.33 | 38.61 | 4.83 | 93.38 | 1.33 |
| | SpyCas9 | 95.69 | 1.07 | 96.87 | 1.86 | 95.40 | 1.21 |
| | Nme2Cas9 + AAV | 55.60 | 4.17 | 52.36 | 7.23 | 64.49 | 3.87 |
| | SpyCas9 + AAV | 55.21 | 3.59 | 70.55 | 2.78 | 68.82 | 6.50 |
| | Nme2 BE | 96.86 | 2.85 | 92.80 | 6.16 | 92.87 | 1.17 |
| | Nme2 BE + Nme2Cas9 | 93.62 | 2.26 | 89.74 | 2.27 | 93.45 | 3.39 |
| | Nme2 BE + SpyCas9 | 97.11 | 2.00 | 86.25 | 12.98 | 95.45 | 0.87 |
| | Nme2 BE + Nme2Cas9 + AAV | 96.07 | 1.53 | 97.14 | 0.56 | 97.75 | 1.08 |
| | Nme2 BE + SpyCas9 + AAV | 96.37 | 0.59 | 97.69 | 0.18 | 97.27 | 1.15 |
| | Spy BE | 97.84 | 1.13 | 97.01 | 1.20 | 96.03 | 0.20 |
| | Spy BE + Nme2Cas9 | 98.85 | 0.51 | 97.79 | 0.82 | 93.99 | 1.57 |
| | Spy BE + SpyCas9 | 92.26 | 3.62 | 92.97 | 2.36 | 85.78 | 5.33 |
| | Spy BE + Nme2Cas9 + AAV | 99.66 | 0.59 | 98.58 | 0.80 | 99.63 | 0.21 |
| | Spy BE + SpyCas9 + AAV | 95.39 | 4.32 | 94.63 | 6.43 | 86.04 | 14.58 |
| Vb8+ | No RNA, No AAV | 4.52 | 2.28 | 7.85 | 3.41 | 4.30 | 0.76 |
| | AAV only | 5.37 | 2.12 | 8.57 | 1.15 | 4.81 | 0.24 |
| | Nme2 BE no guides | 3.94 | 1.70 | 6.93 | 0.70 | 4.69 | 0.74 |
| | Spy BE no guides | 4.58 | 0.81 | 6.02 | 0.18 | 4.21 | 0.62 |
| | Nme2Cas9 | 0.28 | 0.16 | 3.59 | 1.46 | 0.23 | 0.23 |
| | SpyCas9 | 0.34 | 0.31 | 0.48 | 0.83 | 0.14 | 0.09 |
| | Nme2Cas9 + AAV | 49.49 | 5.74 | 49.23 | 8.00 | 59.70 | 6.46 |
| | SpyCas9 + AAV | 49.72 | 3.83 | 66.90 | 3.45 | 63.34 | 7.86 |
| | Nme2 BE | 0.05 | 0.09 | 0.35 | 0.61 | 0.13 | 0.07 |
| | Nme2 BE + Nme2Cas9 | 0.60 | 1.05 | 0.26 | 0.46 | 0.12 | 0.15 |
| | Nme2 BE + SpyCas9 | 0.22 | 0.19 | 0.90 | 0.90 | 0.05 | 0.04 |
| | Nme2 BE + Nme2Cas9 + AAV | 56.65 | 4.77 | 57.19 | 2.78 | 65.74 | 3.66 |
| | Nme2 BE + Spy Cas9 + AAV | 79.48 | 2.27 | 80.11 | 2.56 | 81.06 | 1.35 |
| | Spy BE | 0.06 | 0.05 | 0.33 | 0.13 | 0.09 | 0.02 |
| | Spy BE + Nme2Cas9 | 0.05 | 0.08 | 0.38 | 0.05 | 0.26 | 0.34 |
| | Spy BE + SpyCas9 | 0.58 | 0.60 | 0.42 | 0.26 | 0.11 | 0.19 |
| | Spy BE + Nme2Cas9 + AAV | 93.65 | 1.49 | 82.46 | 4.70 | 93.43 | 4.20 |
| | Spy BE + SpyCas9 + AAV | 59.29 | 10.60 | 62.74 | 10.82 | 57.84 | 9.70 |

TABLE 8
Mean percent editing in T cells

| | | | C to T | | | C to A/G | | | Indels | | |
|---|---|---|---|---|---|---|---|---|---|---|---|
| Locus | Donor | Treatment | Mean | SD | n | Mean | SD | n | Mean | SD | n |
| Spy BE | Donor | No RNA, No AAV | 0.22 | 0.21 | 3 | 0.47 | 0.41 | 3 | 0.14 | 0.13 | 3 |
| TRAC | 3410 | Spy BE | 82.54 | 5.70 | 3 | 1.18 | 0.07 | 3 | 4.71 | 4.56 | 3 |
| G023520 | | Spy BE + Nme2Cas9 | 83.08 | 6.03 | 3 | 2.92 | 2.64 | 3 | 0.89 | 0.78 | 3 |
| | | Spy BE + SpyCas9 | 58.58 | 2.58 | 3 | 1.04 | 0.27 | 3 | 22.05 | 0.76 | 3 |
| | Donor | No RNA, No AAV | 0.31 | 0.19 | 3 | 0.63 | 0.00 | 3 | 0.19 | 0.02 | 3 |
| | 3786 | Spy BE | 91.66 | 0.95 | 3 | 1.11 | 0.08 | 3 | 1.18 | 0.20 | 3 |
| | | Spy BE + Nme2Cas9 | 92.07 | 2.22 | 3 | 1.37 | 0.19 | 3 | 0.94 | 0.15 | 3 |
| | | Spy BE + SpyCas9 | 63.28 | 0.72 | 3 | 1.11 | 0.28 | 3 | 28.98 | 0.27 | 3 |
| | Donor | No RNA, No AAV | 17.82 | 17.45 | 3 | 1.00 | 0.29 | 3 | 0.55 | 0.48 | 3 |
| | 45127 | Spy BE | 93.89 | 0.94 | 3 | 1.08 | 0.12 | 3 | 0.63 | 0.11 | 3 |
| | | Spy BE + Nme2Cas9 | 94.05 | 1.12 | 3 | 1.14 | 0.09 | 3 | 0.71 | 0.24 | 3 |
| | | Spy BE + SpyCas9 | 62.68 | 1.62 | 3 | 1.00 | 0.09 | 3 | 28.64 | 0.96 | 3 |
| Spy BE | Donor | No RNA, No AAV | 0.30 | 0.02 | 3 | 1.58 | 0.17 | 3 | 0.32 | 0.12 | 3 |
| TRBC1 | 3410 | Spy BE | 41.64 | 16.02 | 3 | 2.78 | 0.72 | 3 | 37.83 | 26.97 | 3 |
| G023524 | | Spy BE + Nme2Cas9 | 85.43 | 5.60 | 3 | 4.94 | 0.40 | 3 | 3.36 | 3.54 | 3 |
| | | Spy BE + SpyCas9 | 45.07 | 6.66 | 3 | 2.77 | 0.33 | 3 | 40.63 | 6.14 | 3 |
| | Donor | No RNA, No AAV | 1.31 | 0.93 | 3 | 1.70 | 0.10 | 3 | 0.53 | 0.07 | 3 |
| | 3786 | Spy BE | 84.95 | 5.87 | 2 | 4.76 | 0.25 | 2 | 3.50 | 2.12 | 2 |
| | | Spy BE + Nme2Cas9 | 89.15 | 1.66 | 3 | 4.56 | 0.16 | 3 | 1.26 | 0.10 | 3 |
| | | Spy BE + SpyCas9 | 50.70 | 2.37 | 3 | 2.66 | 0.17 | 3 | 40.24 | 0.94 | 3 |
| | Donor | No RNA, No AAV | 0.59 | 0.05 | 3 | 1.58 | 0.28 | 3 | 0.51 | 0.09 | 3 |
| | 45127 | Spy BE | 84.82 | 4.62 | 3 | 4.20 | 0.45 | 3 | 1.55 | 0.23 | 3 |
| | | Spy BE + Nme2Cas9 | 90.59 | 0.74 | 3 | 4.36 | 0.30 | 3 | 1.12 | 0.08 | 3 |
| | | Spy BE + SpyCas9 | 49.44 | 6.79 | 3 | 2.74 | 0.43 | 3 | 36.66 | 4.32 | 3 |
| Spy BE | Donor | No RNA, No AAV | 1.82 | 0.56 | 3 | 2.22 | 0.18 | 3 | 0.33 | 0.02 | 3 |
| TRBC2 | 3410 | Nme2 BE | 81.25 | 2.37 | 3 | 6.25 | 0.27 | 3 | 2.38 | 0.17 | 3 |
| G023524 | | Nme2 BE + Nme2Cas9 | 28.93 | 2.87 | 3 | 2.90 | 0.16 | 3 | 45.04 | 1.57 | 3 |
| | | Spy BE + Nme2Cas9 | 77.18 | 7.55 | 3 | 6.58 | 1.17 | 3 | 2.37 | 0.68 | 3 |
| | Donor | No RNA, No AAV | 2.58 | 0.26 | 2 | 2.23 | 0.00 | 2 | 0.39 | 0.05 | 2 |
| | 3786 | Nme2 BE | 53.46 | 46.30 | 3 | 38.01 | 53.69 | 3 | 1.83 | 1.70 | 3 |
| | | Nme2 BE + Nme2Cas9 | 34.59 | 1.87 | 3 | 2.77 | 0.25 | 3 | 53.90 | 1.70 | 3 |
| | | Spy BE + Nme2Cas9 | 84.02 | 2.41 | 3 | 7.17 | 0.61 | 3 | 2.43 | 0.51 | 3 |
| | Donor | No RNA, No AAV | 1.89 | 0.86 | 3 | 2.28 | 0.09 | 3 | 0.29 | 0.10 | 3 |
| | 45127 | Nme2 BE | 83.00 | 0.98 | 3 | 6.36 | 0.29 | 3 | 2.39 | 0.94 | 3 |
| | | Nme2 BE + Nme2Cas9 | 33.53 | 5.09 | 3 | 2.78 | 0.32 | 3 | 49.17 | 7.44 | 3 |
| | | Spy BE + Nme2Cas9 | 87.88 | 0.75 | 3 | 5.97 | 0.28 | 3 | 1.77 | 0.04 | 3 |
| SpyCas9 | Donor | No RNA, No AAV | 0.16 | 0.03 | 3 | 0.73 | 0.06 | 3 | 0.44 | 0.11 | 3 |
| TRAC | 3410 | SpyCas9 | 0.01 | 0.01 | 3 | 0.13 | 0.03 | 3 | 96.11 | 0.27 | 3 |
| G013006 | | Nme2 BE + SpyCas9 | 6.54 | 0.68 | 3 | 0.45 | 0.13 | 3 | 83.37 | 9.38 | 3 |
| | | Spy BE + SpyCas9 | 66.13 | 1.10 | 3 | 2.77 | 0.23 | 3 | 23.59 | 0.94 | 3 |
| | Donor | No RNA, No AAV | 0.18 | 0.04 | 3 | 0.79 | 0.04 | 3 | 0.46 | 0.21 | 3 |
| | 3786 | SpyCas9 | 0.03 | 0.01 | 3 | 0.06 | 0.01 | 3 | 97.47 | 0.41 | 3 |
| | | Nme2 BE + SpyCas9 | 5.19 | 0.80 | 3 | 0.30 | 0.03 | 3 | 91.86 | 0.43 | 3 |
| | | Spy BE + SpyCas9 | 64.38 | 1.16 | 3 | 2.78 | 0.18 | 3 | 27.24 | 0.77 | 3 |
| | Donor | No RNA, No AAV | 0.22 | 0.04 | 3 | 0.76 | 0.16 | 3 | 0.32 | 0.08 | 3 |
| | 45127 | SpyCas9 | 0.03 | 0.02 | 3 | 0.11 | 0.03 | 3 | 96.72 | 0.54 | 3 |
| | | Nme2 BE + SpyCas9 | 7.57 | 0.50 | 3 | 0.33 | 0.01 | 3 | 89.96 | 0.66 | 3 |
| | | Spy BE + SpyCas9 | 67.08 | 0.48 | 3 | 2.69 | 0.33 | 3 | 24.13 | 0.13 | 3 |
| Nme2 BE | Donor | No RNA, No AAV | 0.24 | 0.00 | 1 | 1.18 | 0.00 | 1 | 0.13 | 0.00 | 1 |
| TRAC | 3410 | Nme2 BE | 60.14 | 14.46 | 3 | 2.24 | 1.07 | 3 | 9.63 | 13.65 | 3 |
| G028935 | | Nme2 BE + Nme2Cas9 | 20.74 | 0.91 | 2 | 2.03 | 0.01 | 2 | 44.67 | 1.31 | 2 |
| | | Spy BE + Nme2Cas9 | 22.62 | 14.01 | 3 | 1.78 | 0.32 | 3 | 1.45 | 0.99 | 3 |
| | Donor | No RNA, No AAV | 0.30 | 0.05 | 3 | 1.19 | 0.17 | 3 | 0.15 | 0.02 | 3 |
| | 3786 | Nme2 BE | 86.81 | 1.57 | 3 | 3.18 | 0.55 | 3 | 2.69 | 1.25 | 3 |
| | | Nme2 BE + Nme2Cas9 | 21.13 | 3.19 | 3 | 1.55 | 0.25 | 3 | 69.11 | 6.71 | 3 |
| | | Spy BE + Nme2Cas9 | 83.36 | 2.74 | 3 | 3.51 | 0.26 | 3 | 4.50 | 0.36 | 3 |
| | Donor | No RNA, No AAV | 0.34 | 0.04 | 2 | 1.28 | 0.13 | 2 | 0.10 | 0.01 | 2 |
| | 45127 | Nme2 BE | 69.26 | 16.30 | 3 | 2.86 | 0.43 | 3 | 3.04 | 1.83 | 3 |
| | | Nme2 BE + Nme2Cas9 | 24.18 | 1.65 | 3 | 1.85 | 0.16 | 3 | 51.95 | 2.75 | 3 |
| | | Spy BE + Nme2Cas9 | 58.64 | 6.57 | 3 | 2.29 | 0.06 | 3 | 3.31 | 1.68 | 3 |
| Nme2 BE | Donor | No RNA, No AAV | 0.67 | 0.02 | 3 | 2.14 | 0.06 | 3 | 0.19 | 0.02 | 3 |
| TRBC1 | 3410 | Nme2 BE | 80.76 | 1.87 | 3 | 5.96 | 0.12 | 3 | 2.19 | 0.06 | 3 |
| G028986 | | Nme2 BE + Nme2Cas9 | 33.74 | 3.05 | 3 | 3.25 | 0.22 | 3 | 39.30 | 2.37 | 3 |
| | | Spy BE + Nme2Cas9 | 76.48 | 10.05 | 3 | 6.76 | 1.27 | 3 | 2.18 | 0.38 | 3 |
| | Donor | No RNA, No AAV | 2.08 | 0.88 | 3 | 2.10 | 0.26 | 3 | 0.29 | 0.15 | 3 |
| | 3786 | Nme2 BE | 83.13 | 0.88 | 3 | 7.15 | 0.50 | 3 | 2.89 | 1.48 | 3 |
| | | Nme2 BE + Nme2Cas9 | 32.96 | 6.88 | 3 | 2.87 | 0.62 | 3 | 53.89 | 5.17 | 3 |
| | | Spy BE + Nme2Cas9 | 81.49 | 2.92 | 3 | 7.34 | 0.52 | 3 | 3.14 | 1.18 | 3 |
| | Donor | No RNA, No AAV | 1.30 | 0.17 | 3 | 2.23 | 0.24 | 3 | 0.23 | 0.01 | 3 |
| | 45127 | Nme2 BE | 77.77 | 10.90 | 3 | 5.68 | 1.10 | 3 | 1.60 | 0.30 | 3 |
| | | Nme2 BE + Nme2Cas9 | 32.22 | 0.92 | 3 | 2.76 | 0.30 | 3 | 49.49 | 1.83 | 3 |
| | | Spy BE + Nme2Cas9 | 86.16 | 1.21 | 3 | 5.91 | 0.29 | 3 | 2.21 | 0.14 | 3 |
| Nme2 BE | Donor | No RNA, No AAV | 1.82 | 0.56 | 3 | 2.22 | 0.18 | 3 | 0.33 | 0.02 | 3 |
| TRBC2 | 3410 | Nme2 BE | 81.25 | 2.37 | 3 | 6.25 | 0.27 | 3 | 2.38 | 0.17 | 3 |
| G028986 | | Nme2 BE + Nme2Cas9 | 28.93 | 2.87 | 3 | 2.90 | 0.16 | 3 | 45.04 | 1.57 | 3 |
| | | Spy BE + Nme2Cas9 | 77.18 | 7.55 | 3 | 6.58 | 1.17 | 3 | 2.37 | 0.68 | 3 |
| | Donor | No RNA, No AAV | 2.58 | 0.26 | 2 | 2.23 | 0.00 | 2 | 0.39 | 0.05 | 2 |
| | 3786 | Nme2 BE | 53.46 | 46.30 | 3 | 38.01 | 53.69 | 3 | 1.83 | 1.70 | 3 |
| | | Nme2 BE + Nme2Cas9 | 34.59 | 1.87 | 3 | 2.77 | 0.25 | 3 | 53.90 | 1.70 | 3 |
| | | Spy BE + Nme2Cas9 | 84.02 | 2.41 | 3 | 7.17 | 0.61 | 3 | 2.43 | 0.51 | 3 |
| | Donor | No RNA, No AAV | 1.89 | 0.86 | 3 | 2.28 | 0.09 | 3 | 0.29 | 0.10 | 3 |
| | 45127 | Nme2 BE | 83.00 | 0.98 | 3 | 6.36 | 0.29 | 3 | 2.39 | 0.94 | 3 |
| | | Nme2 BE + Nme2Cas9 | 33.53 | 5.09 | 3 | 2.78 | 0.32 | 3 | 49.17 | 7.44 | 3 |
| | | Spy BE + Nme2Cas9 | 87.88 | 0.75 | 3 | 5.97 | 0.28 | 3 | 1.77 | 0.04 | 3 |
| Nme2Cas9 | Donor | No RNA, No AAV | 0.17 | 0.03 | 3 | 0.75 | 0.14 | 3 | 0.57 | 0.09 | 3 |
| TRAC | 3410 | Nme2 BE | 0.10 | 0.01 | 3 | 0.63 | 0.23 | 3 | 41.21 | 1.82 | 3 |
| G021469 | | Nme2 BE + Nme2Cas9 | 0.37 | 0.02 | 3 | 0.73 | 0.07 | 3 | 13.32 | 0.64 | 3 |
| | | Spy BE + Nme2Cas9 | 0.10 | 0.02 | 3 | 0.55 | 0.04 | 3 | 34.91 | 0.39 | 3 |
| | Donor | No RNA, No AAV | 0.19 | 0.08 | 3 | 0.72 | 0.05 | 3 | 0.47 | 0.21 | 3 |
| | 3786 | Nme2 BE | 0.02 | 0.04 | 3 | 0.04 | 0.04 | 3 | 98.31 | 2.79 | 3 |
| | | Nme2 BE + Nme2Cas9 | 0.00 | 0.00 | 3 | 0.00 | 0.00 | 3 | 33.83 | 57.30 | 3 |
| | | Spy BE + Nme2Cas9 | 0.05 | 0.02 | 3 | 0.14 | 0.05 | 3 | 89.85 | 4.22 | 3 |
| | Donor | No RNA, No AAV | 0.21 | 0.05 | 3 | 0.78 | 0.08 | 3 | 0.41 | 0.10 | 3 |
| | 45127 | Nme2 BE | 0.03 | 0.01 | 3 | 0.08 | 0.01 | 3 | 95.24 | 0.85 | 3 |
| | | Nme2 BE + Nme2Cas9 | 0.27 | 0.07 | 3 | 0.50 | 0.07 | 3 | 37.49 | 1.05 | 3 |
| | | Spy BE + Nme2Cas9 | 0.04 | 0.01 | 3 | 0.11 | 0.02 | 3 | 95.29 | 0.22 | 3 |

### Example 3. One Pot Methods Using Lipid Nanoparticles

### Example 3.1. T Cell Preparation

[0590] Healthy human donor apheresis was obtained commercially (Hemacare), and cells were washed, re-suspended in CliniMACS® PBS/EDTA buffer (Miltenyi Biotec Cat. 130-070-525) and processed in a MultiMACS™ Cell 24 Separator Plus device (Miltenyi Biotec). T cells were isolated via positive selection using a Straight from Leukopak® CD4/CD8 MicroBead kit, human (Miltenyi Biotec Cat. 130-122-352). T cells were aliquoted and cryopreserved for future use in Cryostor® CS10 (StemCell Technologies Cat. 07930).

[0591] Upon thaw, T cells were plated at a density of 1.0×10\hat{ }6 cells/mL in T cell growth media (TCGM) composed of CTS OpTmizer T Cell Expansion SFM and T Cell Expansion Supplement (ThermoFisher Cat. A1048501), 5% human AB serum (GeminiBio, Cat. 100-512) 1× Penicillin-Streptomycin, 1× Glutamax, 10 mM HEPES, 200 U/mL recombinant human interleukin-2 (Peprotech, Cat. 200-02), 5 ng/mL recombinant human interleukin 7 (Peprotech, Cat. 200-07), and 5 ng/mL recombinant human interleukin 15 (Peprotech, Cat. 200-15). T cells were rested in this media for 24 hours, at which time they were activated with T Cell TransAct™, human reagent (Miltenyi, Cat. 130-111-160) added at a 1:100 ratio by volume. T cells were activated for 48 hours prior to LNP treatment.

### Example 3.2. T Cell Treatment and Expansion

[0592] Forty-eight hours post-activation, T cells were harvested, centrifuged at 500 g for 5 min, and resuspended at a concentration of 1×10\hat{ }6 T cells/mL in T cell plating media (TCPM): a serum-free version of TCGM containing 400 U/mL recombinant human interleukin-2 (Peprotech, Cat. 200-02), 10 ng/ml recombinant human interleukin 7 (Peprotech, Cat. 200-07), and 10 ng/ml recombinant human interleukin 15 (Peprotech, Cat. 200-15). T cells in TCPM (were seeded at 5×10\hat{ }4 cells per well in flat-bottom 96-well plates.

[0593] LNPs were generated as described in Example 1 at a molar ratio of 35 Lipid A/47.5 cholesterol/15 DSPC/2.5 PEG2k-DMG. Messenger RNA sequences are as described in Example 1. Prior to T cell treatments, different mixtures of LNPs were prepared in T cell treatment media (TC™): a version of TCGM containing 20 ug/mL rhApoE3 in the absence of interleukins 2, 7 or 15. The final concentration of each LNPs in every treatment group is shown in Table 9. LNP mixtures were incubated at 37° C. for 15 minutes and then added to 5×10\hat{ }4 T cells that were previously seeded in 96-well plates.

[0594] Next, Compound 1 and a repair template in the form of an adeno-associated virus (AAV) encoding a TCR (SEQ ID NO: 297) were diluted in TCTM and added to T cells at the final concentrations of 0.5 μM and 3×10\hat{ }5 genome copies/cell, respectively. T cells were incubated at 37° C. for 24 hours, at which time they were centrifuged at 500 g for 5 mi, resuspended in fresh TCGM and returned to the incubator. On day 4 post-treatment, T cells were sub-cultured at a 1:4 ratio (v/v) in TCGM. On day 7 post-treatment, flow cytometry was performed to assess the knockout efficiency of different surface receptors encoded by genes targeted by Sp base editor and the insertion efficiency of TCR in the TRAC locus by SpCas9 or Nme2 Cas9.

TABLE 9
Compositions of LNP mixtures in each treatment group.
The final concentration of each LNP is shown in μg/mL

| | Treatment groups | | | | | | |
|---|---|---|---|---|---|---|---|
| LNP | | AAV | SpBC22n | SpCas9 | Nme2 Cas9 | SpBC22n + | SpBC22n + |
| composition | Untreated | only | only | only | only | SpCas9 | Nme2 Cas9 |
| SpBC22n | — | — | 0.83 | — | — | 0.83 | 0.83 |
| mRNA | | | | | | | |
| UGI mRNA | — | — | 0.4175 | — | — | 0.4175 | 0.4175 |
| TRAC G023520 | — | — | 0.15 | — | — | 0.15 | 0.15 |
| SpBC22n guide | | | | | | | |
| TRBC1/2 | — | — | 0.29 | — | — | 0.29 | 0.29 |
| G023524 | | | | | | | |
| SpBC22n guide | | | | | | | |
| CIITA G023521 | — | — | 0.715 | — | — | 0.715 | 0.715 |
| SpBC22n guide | | | | | | | |
| HLA-A | — | — | 2.185 | — | — | 2.185 | 2.185 |
| G023524 | | | | | | | |
| SpBC22n guide | | | | | | | |
| SpCas9 mRNA | — | — | — | 0.4175 | — | 0.4175 | — |
| TRAC G013006 | — | — | — | 0.83 | — | 0.83 | — |
| Spy Cas9 guide | | | | | | | |
| Nme2 Cas9 | — | — | — | — | 0.4175 | — | 0.4175 |
| mRNA | | | | | | | |
| TRAC G021469 | — | — | — | — | 0.83 | — | 0.83 |
| Nme2 Cas9 | | | | | | | |
| guide | | | | | | | |
| HD1 TCR AAV | − | + | − | + | + | + | + |

### Example 3.3. Flow Cytometry

[0595] On day 7 post-LNP treatment, T cells were transferred to U-bottom 96-well plates and spun down for 5 minutes at 500 g. The supernatant was discarded, and cells were resuspended in FACS buffer containing Viakrome 808 (Beckman Coulter, Cat. C36628) (1:100), PC5.5 anti-human CD3 (Biolegend, Cat. 300430) (1:100), BV421 anti-human CD4 (Biolegend, Cat. 317434) (1:100), BV785 anti-human CD8 (Biolegend, Cat. 301046) (1:100), APC/Fire 750 anti-human HLA-DR, DP, DQ (Biolegend, Cat. 361712) (1:50), BV510 anti-human HLA-A2 (Biolegend, Cat. 343320) (1:100), FITC anti-human HLA-A3 (eBioscience Cat. 11-5754-42) (1:100), and PE anti-human TCR V08 (Biolegend, Cat. 348104) (1:100). T cells were stained for 30 minutes at 4° C. in the dark. T cells were washed once, resuspended in FACS buffer, and processed on a Cytoflex LX flow cytometer (Beckman Coulter). Flow cytometry data was processed on FlowJo version 10.8.1 (BD Biosciences). All T cells were gated on size, singularity, and viability and CD8+ expression. Percentages of CD8+ T cells negative for specific antigens and/or positive for TCR insertion are shown in Table 10 and FIGS. 5A-5E.

TABLE 10
Percentages of T cells negative for different antigens and/or positive for HD1 TCR insertion.

| | | Donor 1 | | | Donor 2 | | | Donor 3 | | | Donor 4 | | |
|---|---|---|---|---|---|---|---|---|---|---|---|---|---|
| Marker | Treatment group | Mean | SD | n | Mean | SD | n | Mean | SD | n | Mean | SD | n |
| CD3− | Untreated | 0.7 | 0.2 | 3 | 0.3 | 0.1 | 3 | 0.3 | 0.1 | 3 | 0.3 | 0.0 | 3 |
| | AAV only | 0.5 | 0.2 | 3 | 0.2 | 0.1 | 3 | 0.1 | 0.1 | 3 | 0.2 | 0.1 | 3 |
| | SpBC22n only | 99.7 | 0.0 | 3 | 98.5 | 0.2 | 3 | 99.4 | 0.1 | 3 | 99.4 | 0.1 | 2 |
| | SpCas9 only | 11.3 | 3.6 | 3 | 6.4 | 1.0 | 3 | 12.1 | 0.2 | 3 | 12.3 | 0.4 | 3 |
| | Nme2 Cas9 only | 5.8 | 3.1 | 3 | 4.1 | 0.1 | 3 | 7.0 | 0.6 | 3 | 7.9 | 0.6 | 3 |
| | SpBC22n + SpCas9 | 46.0 | 7.3 | 3 | 56.8 | 1.4 | 3 | 52.6 | 0.5 | 3 | 58.2 | 6.4 | 3 |
| | SpBC22n + Nme2 Cas9 | 10.1 | 1.5 | 3 | 17.9 | 0.8 | 3 | 9.8 | 0.3 | 3 | 16.8 | 1.0 | 3 |
| HLA-DR, | Untreated | 52.2 | 7.3 | 3 | 47.2 | 3.2 | 3 | 64.7 | 1.0 | 3 | 57.8 | 1.6 | 3 |
| DP, DQ− | AAV only | 53.6 | 4.1 | 3 | 48.3 | 1.3 | 3 | 63.4 | 1.7 | 3 | 60.6 | 2.1 | 3 |
| | SpBC22n only | 97.8 | 0.4 | 3 | 96.4 | 0.4 | 3 | 98.2 | 0.1 | 3 | 98.0 | 0.4 | 2 |
| | SpCas9 only | 53.7 | 3.5 | 3 | 63.7 | 0.7 | 3 | 74.5 | 1.3 | 3 | 60.9 | 1.2 | 3 |
| | Nme2 Cas9 only | 44.9 | 9.2 | 3 | 54.8 | 1.8 | 3 | 62.6 | 1.1 | 3 | 52.5 | 0.6 | 3 |
| | SpBC22n + SpCas9 | 95.7 | 2.3 | 3 | 91.4 | 0.3 | 3 | 97.7 | 0.1 | 3 | 93.3 | 2.7 | 3 |
| | SpBC22n + Nme2 Cas9 | 98.7 | 0.1 | 3 | 96.2 | 0.6 | 3 | 99.0 | 0.2 | 3 | 98.0 | 0.3 | 3 |
| Union of | Untreated | 1.2 | 0.2 | 3 | 0.8 | 0.2 | 3 | 1.2 | 0.4 | 3 | 1.1 | 0.2 | 3 |
| HLA-A2− | AAV only | 1.2 | 0.1 | 3 | 0.2 | 0.1 | 3 | 0.2 | 0.1 | 3 | 0.4 | 0.2 | 3 |
| and HLA- | SpBC22n only | 98.6 | 0.2 | 3 | 98.8 | 0.2 | 3 | 99.4 | 0.1 | 3 | 99.3 | 0.4 | 2 |
| A3− | SpCas9 only | 1.2 | 0.2 | 3 | 0.6 | 0.2 | 3 | 0.5 | 0.2 | 3 | 0.5 | 0.2 | 3 |
| | Nme2 Cas9 only | 0.7 | 0.2 | 3 | 0.1 | 0.0 | 3 | 0.2 | 0.0 | 3 | 0.4 | 0.3 | 3 |
| | SpBC22n + SpCas9 | 98.7 | 0.6 | 3 | 95.2 | 1.2 | 3 | 99.5 | 0.1 | 3 | 98.5 | 0.8 | 3 |
| | SpBC22n + Nme2 Cas9 | 99.9 | 0.1 | 3 | 98.5 | 0.2 | 3 | 99.9 | 0.0 | 3 | 99.9 | 0.0 | 3 |
| CD3+ Vb8+ | Untreated | 4.4 | 0.5 | 3 | 6.6 | 1.1 | 3 | 7.3 | 0.6 | 3 | 7.5 | 4.5 | 3 |
| | AAV only | 5.8 | 1.5 | 3 | 6.5 | 0.3 | 3 | 6.2 | 0.6 | 3 | 4.4 | 1.0 | 3 |
| | SpBC22n only | 0.0 | 0.0 | 3 | 0.1 | 0.0 | 3 | 0.0 | 0.0 | 3 | 0.0 | 0.0 | 2 |
| | SpCas9 only | 84.2 | 3.3 | 3 | 85.8 | 0.6 | 3 | 83.9 | 0.4 | 3 | 81.6 | 0.2 | 3 |
| | Nme2 Cas9 only | 90.0 | 3.9 | 3 | 89.8 | 1.2 | 3 | 88.3 | 1.0 | 3 | 87.8 | 1.1 | 3 |
| | SpBC22n + SpCas9 | 55.6 | 7.2 | 3 | 41.9 | 1.1 | 3 | 48.2 | 0.7 | 3 | 41.8 | 6.3 | 3 |
| | SpBC22n + Nme2 Cas9 | 90.5 | 1.5 | 3 | 81.8 | 0.6 | 3 | 90.5 | 0.2 | 3 | 83.7 | 0.9 | 3 |
| CD3+, | Untreated | 0.1 | 0.2 | 3 | 0.5 | 0.1 | 3 | 0.8 | 0.4 | 3 | 0.6 | 0.2 | 3 |
| Vb8+, | AAV only | 0.1 | 0.1 | 3 | 0.0 | 0.0 | 3 | 0.0 | 0.0 | 3 | 0.0 | 0.0 | 3 |
| HLA-DR, | SpBC22n only | 0.0 | 0.0 | 3 | 0.0 | 0.0 | 3 | 0.0 | 0.0 | 3 | 0.0 | 0.0 | 3 |
| DP, DQ−, | SpCas9 only | 0.6 | 0.2 | 3 | 0.1 | 0.0 | 3 | 0.2 | 0.1 | 3 | 0.2 | 0.1 | 3 |
| [HLA-A2−/ | Nme2 Cas9 only | 0.5 | 0.1 | 3 | 0.1 | 0.0 | 3 | 0.1 | 0.0 | 3 | 0.2 | 0.1 | 3 |
| HLA-A | SpBC22n + SpCas9 | 53.5 | 7.6 | 3 | 37.1 | 0.4 | 3 | 46.7 | 0.4 | 3 | 38.2 | 4.8 | 3 |
| A3−] | SpBC22n + Nme2 Cas9 | 89.6 | 1.3 | 3 | 79.2 | 0.6 | 3 | 89.8 | 0.2 | 3 | 82.5 | 0.6 | 3 |

### Example 4. Simultaneous Multi-Edit with Nme2Cas9 and SpBC22n in Primary Mouse Hepatocytes

[0596] Primary mouse hepatocytes (PMH) were edited simultaneously at the albumin locus using NmeCas9 and at the TTR locus using SpCas9 or SpBC22n base editor. PMH (Gibco, Lot MC931) were thawed and resuspended in hepatocyte thawing medium with plating supplements (William's E Medium (Gibco, Cat. A12176-01)) with dexamethasone+cocktail supplement (Gibco, Cat. A15563, Lot 2019842) and Plating Supplements with FBS content (Gibco, Cat. A13450, Lot 1970698) followed by centrifugation. The supernatant was discarded, and the pelleted cells resuspended in hepatocyte plating medium plus supplement pack (Invitrogen, Cat. A1217601 and Gibco, Cat. CM3000). Cells were counted and plated on Bio-coat collagen I coated 96-well plates (ThermoFisher, Cat. 877272) at a concentration of 20,000 cells/well. Plated cells were allowed to settle and adhere for 4-6 hours in a tissue culture incubator at 37° C. and 5% CO2 atmosphere. After incubation cells were checked for monolayer formation and were washed once with hepatocyte maintenance medium (Invitrogen, Cat. A1217601 and Gibco, Cat. CM4000). Each condition was tested with technical duplicate samples. Cellartis PowerHEP Medium (Takara Bio, Y20020) was added for a total volume of 100 uL for each plate.

[0597] LNPs were generally prepared as described in Example 1 with either a single RNA species as cargo, or a co-formulation of gRNA and mRNA. The LNPs were prepared with a molar ratio of 50 Lipid A:38 cholesterol:9 The LNPs were prepared with a molar ratio of 50 Lipid A:38 cholesterol:9 DSPC: 3 PEG2k-DMG. Messenger RNA sequences are as described in Example 1. The LNPs were formulated with a lipid amine to RNA phosphate (N:P) molar ratio of about 6. For Nme2Cas9 mRNA and albumin guide coformulation, LNPs were prepared with a ratio of 2:1 by weight of gRNA to editor mRNA cargo. For SpyCas9 and SpyCas9 base editor mRNA and TTR guide single formulations, LNPs were prepared with a single RNA species as cargo and LNPs were mixed at a ratio of 1:2 by weight of gRNA cargo to editor mRNA cargo before treatment.

[0598] Cells were treated with LNPs at the dosages indicated in Table 11. Dilution series indicates an 8-point, three-fold dilution series of doses were used starting at a high concentration of 300 ng combined guide and editor mRNA. Each sample was treated with an additional 5 ng LNP containing UGI mRNA. Insertion efficiency was tested in cells treated with an AAV vector encoding a NanoLuc template (SEQ ID No: 304) at a multiplicity of infection (MOI) of 5E5, and quantified via expression of NanoLuc template using the Nano-Glo Luciferase assay. Editing efficiency was tested in cells that did not receive AAV treatment. The total volume of all components delivered was 100 uL/well.

TABLE 11

| Group | Treatment | mRNA | gRNA | Dosage |
|---|---|---|---|---|
| Nme2Cas9 | LNP | Nme2Cas9 | G023805 | Dilution series |
| insertion only | | | (albumin) | |
| SpCas9 | LNP mix | SpCas9 | G025427 | Dilution Series |
| insertion only | | | (TTR) | |
| Spy Base Edit | LNP mix | Sp BE | G025427 | Dilution Series |
| only | | | (TTR) | |
| SpCas9 + | LNP | Nme2Cas9 | G023805 | 100 ng combined |
| Fixed A1AT | | | (albumin) | RNA |
| Insertion | LNP mix | SpCas9 | G025427 | Dilution Series |
| | | | (TTR) | |
| Spy Base edit + | LNP | Nme2Cas9 | G023805 | 100 ng combined |
| Fixed A1AT | | | (albumin) | RNA |
| Insertion | LNP mix | Sp BE | G025427 | Dilution Series |
| | | | (TTR) | |
| Insertion + | LNP | Nme2Cas9 | G023805 | Dilution Series |
| Fixed SpCas9 | | | (albumin) | |
| | LNP mix | SpCas9 | G025427 | 100 ng combined |
| | | | (TTR) | RNA |
| Insertion + | LNP | Nme2Cas9 | G023805 | Dilution Series |
| Fixed Base | | | (albumin) | |
| Edit | LNP mix | Sp BE | G025427 | 100 ng combined |
| | | | (TTR) | RNA |

[0599] Seventy-two hours post treatment, transfection plates for editing readout were subjected to lysis, PCR amplification of the TTR and Albumin locus, and subsequent NGS analysis, as described in Example 1. All experiments were performed in biological duplicates. Table 12 and FIG. 6B show mean percent editing at the TTR locus.

TABLE 12
Mean percent editing at the TTR locus following
treatment with SpCas9 or Sp base editor.

| | Editor + | % C to T | | % C to A/G | | % Indel | |
|---|---|---|---|---|---|---|---|
| Treatment | gRNA (ng) | Mean | SD | Mean | SD | Mean | SD |
| Insertion | 300.0 | 0.78 | 0.20 | 1.32 | 0.39 | 0.73 | 0.33 |
| only | 100.0 | 0.54 | 0.16 | 0.91 | 0.11 | 0.36 | 0.09 |
| | 33.0 | 0.73 | 0.24 | 1.02 | 0.01 | 0.66 | 0.28 |
| | 11.0 | 0.90 | 0.05 | 1.04 | 0.18 | 0.50 | 0.03 |
| | 3.7 | 0.87 | 0.17 | 1.22 | 0.08 | 0.98 | 0.18 |
| | 1.2 | 0.98 | 0.57 | 0.92 | 0.10 | 0.66 | 0.00 |
| | 0.4 | 0.83 | 0.27 | 1.00 | 0.03 | 0.50 | 0.04 |
| | 0.0 | 0.80 | 0.19 | 1.20 | 0.34 | 0.53 | 0.06 |
| SpCas9 | 300.0 | 0.02 | 0.01 | 0.14 | 0.00 | 99.24 | 0.08 |
| | 100.0 | 0.02 | 0.01 | 0.06 | 0.02 | 97.71 | 0.97 |
| | 33.0 | 0.13 | 0.14 | 0.11 | 0.01 | 95.67 | 1.62 |
| | 11.0 | 0.31 | 0.14 | 0.28 | 0.04 | 89.06 | 1.26 |
| | 3.7 | 0.53 | 0.22 | 0.27 | 0.10 | 84.35 | 1.10 |
| | 1.2 | 0.70 | 0.23 | 0.46 | 0.02 | 60.17 | 0.15 |
| | 0.4 | 1.14 | 0.62 | 0.70 | 0.01 | 28.28 | 0.45 |
| | 0.0 | 1.09 | 0.12 | 1.27 | 0.54 | 9.10 | 0.90 |
| Base Edit | 300.0 | 61.27 | 1.27 | 11.00 | 1.52 | 26.68 | 0.06 |
| only | 100.0 | 56.74 | 3.40 | 10.98 | 0.58 | 30.52 | 3.01 |
| | 33.0 | 50.56 | 2.71 | 10.34 | 1.34 | 36.02 | 0.31 |
| | 11.0 | 48.79 | 2.79 | 10.21 | 1.28 | 32.73 | 1.03 |
| | 3.7 | 49.46 | 1.84 | 8.27 | 0.01 | 32.07 | 0.98 |
| | 1.2 | 51.11 | 2.84 | 5.88 | 1.07 | 26.28 | 3.16 |
| | 0.4 | 45.89 | 1.17 | 4.56 | 0.98 | 17.27 | 5.70 |
| | 0.0 | 23.53 | 3.66 | 2.10 | 0.13 | 9.93 | 0.98 |
| SpCas9 + | 300.0 | 0.02 | 0.01 | 0.14 | 0.17 | 98.60 | 0.13 |
| Fixed | 100.0 | 0.06 | 0.04 | 0.21 | 0.21 | 97.61 | 0.33 |
| Insertion | 33.0 | 0.10 | 0.12 | 0.09 | 0.01 | 94.67 | 1.82 |
| | 11.0 | 0.36 | 0.26 | 0.44 | 0.35 | 86.53 | 0.54 |
| | 3.7 | 0.46 | 0.08 | 0.24 | 0.07 | 81.06 | 0.50 |
| | 1.2 | 0.65 | 0.14 | 0.60 | 0.11 | 56.78 | 2.21 |
| | 0.4 | 1.25 | 0.36 | 1.03 | 0.18 | 18.66 | 0.18 |
| | 0.0 | 0.71 | 0.00 | 0.98 | 0.21 | 4.06 | 0.59 |
| Base edit + | 300.0 | 58.44 | 1.05 | 11.80 | 0.70 | 28.44 | 1.27 |
| Fixed | 100.0 | 57.96 | 3.20 | 11.30 | 0.78 | 29.11 | 2.28 |
| Insertion | 33.0 | 57.80 | 1.62 | 9.39 | 0.35 | 30.47 | 2.81 |
| | 11.0 | 48.69 | 0.37 | 9.39 | 0.64 | 34.05 | 3.43 |
| | 3.7 | 51.81 | 1.75 | 10.39 | 0.33 | 31.84 | 0.18 |
| | 1.2 | 54.91 | 2.76 | 9.05 | 0.78 | 29.69 | 3.90 |
| | 0.4 | 46.13 | 2.51 | 3.35 | 0.29 | 16.98 | 1.49 |
| | 0.0 | 42.78 | 1.66 | 3.08 | 0.32 | 11.53 | 1.87 |
| Insertion + | 300.0 | 0.07 | 0.04 | 0.17 | 0.01 | 90.88 | 0.01 |
| Fixed | 100.0 | 0.05 | 0.00 | 0.11 | 0.04 | 92.86 | 0.14 |
| SpCas9 | 33.0 | 0.02 | 0.01 | 0.14 | 0.00 | 96.98 | 0.27 |
| | 11.0 | 0.03 | 0.00 | 0.08 | 0.02 | 98.17 | 0.10 |
| | 3.7 | 0.04 | 0.01 | 0.10 | 0.01 | 97.99 | 0.02 |
| | 1.2 | 0.06 | 0.02 | 0.11 | 0.02 | 98.02 | 0.36 |
| | 0.4 | 0.03 | 0.03 | 0.10 | 0.03 | 98.12 | 0.67 |
| | 0.0 | 0.04 | 0.00 | 0.12 | 0.06 | 97.56 | 0.01 |
| Insertion + | 300.0 | 60.82 | 0.62 | 9.31 | 0.81 | 28.69 | 0.45 |
| Fixed Base | 100.0 | 61.26 | 3.13 | 10.58 | 2.28 | 26.73 | 1.34 |
| Edit | 33.0 | 54.48 | 2.86 | 11.08 | 0.12 | 32.86 | 2.55 |
| | 11.0 | 48.15 | 1.58 | 10.69 | 0.21 | 36.16 | 0.78 |
| | 3.7 | 50.37 | 2.72 | 11.11 | 1.00 | 33.73 | 0.52 |
| | 1.2 | 57.19 | 1.63 | 10.77 | 0.29 | 30.94 | 1.10 |
| | 0.4 | 59.47 | 7.16 | 9.58 | 2.93 | 29.58 | 3.70 |
| | 0.0 | 60.91 | 0.45 | 10.56 | 0.89 | 27.46 | 0.06 |

[0600] For transfection plates for insertion readout, 50 uL of media from each well was added to equal amounts of prepared Nano-Glo Luciferase assay reagent (Promega N1110) following manufacturer's instructions to quantify NanoLuc signal and read in a Biotek Neo2 plate reader. The remaining media was aspirated from the insertion readout plates, and 100 uL of prepared Cell TiterGlo reagent (Promega G9241) to quantify cell viability, and read in a Biotek Neo2 plate reader. NanoLuc Signal was normalized via cell viability by dividing the NanoLuc signal by the cell viability signal. Table 13 and FIG. 6A show mean percent indels at the albumin locus as assayed in the no-AAV samples. Table 13 and FIG. 6A also show mean fluorescence normalized by cell viability as a read out of relative insertion efficiency across the population.

TABLE 13
Insertion of NanoLuc at the albumin locus expressed
as luminescence (RLU) normalized to cell viability

| | Editor + | | | | Insertion | | |
|---|---|---|---|---|---|---|---|
| | gRNA | % Indel | | | (RLU/cell viability) | | |
| Treatment | (ng) | Mean | SD | n | Mean | SD | n |
| Insertion | 300 | 90.66 | 4.91 | 2 | 32.80 | 5.15 | 2 |
| only | 100 | 91.46 | 2.06 | 2 | 22.40 | 1.51 | 2 |
| | 33 | 82.17 | 1.06 | 2 | 19.80 | 1.10 | 2 |
| | 11 | 43.08 | 15.62 | 2 | 13.73 | 0.70 | 2 |
| | 3.7 | 34.69 | 1.10 | 2 | 4.91 | 2.43 | 2 |
| | 1.2 | 10.32 | 1.81 | 2 | 1.47 | 1.01 | 2 |
| | 0.4 | 4.26 | 1.78 | 2 | 0.74 | 0.59 | 2 |
| | 0 | 1.91 | 0.88 | 2 | 0.20 | 0.00 | 2 |
| SpCas9 | 300 | 1.18 | 0.25 | 2 | 0.22 | 0.00 | 2 |
| | 100 | 0.93 | 0.18 | 2 | 0.10 | 0.04 | 2 |
| | 33 | 1.55 | 0.26 | 2 | 0.08 | 0.01 | 2 |
| | 11 | 0.93 | 0.31 | 2 | 0.07 | 0.01 | 2 |
| | 3.7 | 1.07 | 0.50 | 2 | 0.10 | 0.00 | 2 |
| | 1.2 | 1.40 | 0.34 | 2 | 0.09 | 0.01 | 2 |
| | 0.4 | 1.30 | 0.64 | 2 | 0.06 | 0.02 | 2 |
| | 0 | 0.94 | 0.13 | 2 | 0.06 | 0.01 | 2 |
| Base Edit | 300 | 0.40 | 0.30 | 2 | 0.12 | 0.03 | 2 |
| only | 100 | 0.95 | 0.17 | 2 | 0.09 | 0.01 | 2 |
| | 33 | 1.03 | 0.59 | 2 | 0.07 | 0.01 | 2 |
| | 11 | 0.73 | 0.28 | 2 | 0.05 | 0.02 | 2 |
| | 3.7 | 0.80 | 0.00 | 2 | 0.06 | 0.02 | 2 |
| | 1.2 | 0.70 | 0.10 | 2 | 0.07 | 0.02 | 2 |
| | 0.4 | 1.03 | 0.14 | 2 | 0.07 | 0.02 | 2 |
| | 0 | 0.88 | 0.18 | 2 | 0.07 | 0.01 | 2 |
| SpCas9 + | 300 | 67.04 | 5.35 | 2 | 33.10 | 0.00 | 1 |
| Fixed | 100 | 82.16 | 1.43 | 2 | 25.01 | 3.47 | 2 |
| Insertion | 33 | 87.32 | 1.43 | 2 | 22.74 | 1.18 | 2 |
| | 11 | 77.77 | 0.17 | 2 | 20.69 | 1.50 | 2 |
| | 3.7 | 82.93 | 4.74 | 2 | 18.82 | 2.77 | 2 |
| | 1.2 | 86.97 | 2.58 | 2 | 19.41 | 6.97 | 2 |
| | 0.4 | 86.17 | 2.09 | 2 | 17.86 | 0.65 | 2 |
| | 0 | 91.25 | 0.08 | 2 | 24.70 | 1.05 | 2 |
| Base edit + | 300 | 76.37 | 2.74 | 2 | 20.16 | 8.66 | 2 |
| Fixed | 100 | 83.83 | 0.07 | 2 | 27.76 | 2.00 | 2 |
| Insertion | 33 | 88.91 | 0.28 | 2 | 19.82 | 11.09 | 2 |
| | 11 | 80.21 | 6.44 | 2 | 21.19 | 1.43 | 2 |
| | 3.7 | 88.42 | 1.23 | 2 | 19.94 | 1.25 | 2 |
| | 1.2 | 90.44 | 1.06 | 2 | 24.31 | 3.64 | 2 |
| | 0.4 | 89.96 | 2.22 | 2 | 18.80 | 0.53 | 2 |
| | 0 | 92.06 | 4.89 | 2 | 26.27 | 0.57 | 2 |
| Insertion + | 300 | 88.20 | 3.05 | 2 | 33.10 | 2.95 | 2 |
| Fixed | 100 | 84.11 | 0.16 | 2 | 31.97 | 0.94 | 2 |
| SpCas9 | 33 | 78.36 | 5.41 | 2 | 26.88 | 1.38 | 2 |
| | 11 | 44.14 | 7.61 | 2 | 15.93 | 7.78 | 2 |
| | 3.7 | 18.85 | 5.05 | 2 | 8.73 | 1.91 | 2 |
| | 1.2 | 6.70 | 2.71 | 2 | 2.09 | 1.04 | 2 |
| | 0.4 | 2.15 | 1.27 | 2 | 0.82 | 1.06 | 2 |
| | 0 | 1.11 | 0.06 | 2 | 0.30 | 0.08 | 2 |
| Insertion + | 300 | 95.57 | 0.00 | 2 | 33.11 | 0.00 | 1 |
| Fixed Base | 100 | 84.00 | 0.10 | 2 | 25.21 | 0.51 | 2 |
| Edit | 33 | 71.87 | 2.41 | 2 | 20.12 | 0.83 | 2 |
| | 11 | 44.47 | 8.35 | 2 | 12.13 | 1.68 | 2 |
| | 3.7 | 24.06 | 1.23 | 2 | 3.01 | 0.75 | 2 |
| | 1.2 | 4.01 | 1.13 | 2 | 1.45 | 0.53 | 2 |
| | 0.4 | 1.74 | 0.38 | 2 | 0.38 | 0.01 | 2 |
| | 0 | 1.16 | 0.22 | 2 | 0.17 | 0.01 | 2 |

### Example 5. In Vivo Orthogonal Editing and Insertion

[0601] The sgRNAs tested in Example 4 were evaluated in vivo to assess the efficiency of simultaneous editing at the TTR locus using NmeCas9 with SpCas9 or Sp base editor and insertion of SERPINA1 encoding A1AT protein into the albumin locus in the mouse model following LNP delivery.

[0602] The LNPs used in this experiment were formulated and prepared as described in Example 4 and contained a single RNA species as cargo, or a co-formulation of gRNA and mRNA. Messenger RNAs used are those described in Example 1. The LNPs formulated were dosed with the sgRNA and mRNA as shown in Table 14. LNPs were delivered with 100 uL of AAV (SEQ ID NO: 298) diluted in 1× phosphate buffered saline+0.0001% PF-68.

TABLE 14
LNP formulations delivered in vivo

| | | Cargo ratio | | | Dose |
|---|---|---|---|---|---|
| Group | LNP Cargo | (sgRNA:mRNA) | Guide ID | mRNA | (mg/kg) |
| 1 | TSS | | | | |
| 2 | co-formulation | 2:1 | G23805 | Nme2 Cas9 | 0.50 |
| 3 | Single cargo | | G25427 | | 0.10 |
| | | | | Sp BC22n BE | 0.20 |
| | | | | UGI | 0.10 |
| 4 | co-formulation | 2:1 | G23805 | Nme2 Ca9 | 0.50 |
| | Single cargo | | G25427 | | 0.10 |
| | | | | Sp BC22n BE | 0.20 |
| | | | | UGI | 0.10 |
| 5 | co-formulation | 1:2 | G25427 | | 0.10 |
| | | | | Sp Cas9 | 0.20 |
| 6 | co-formulation | 1:2 | G23805 | Nme2 Cas9 | 0.50 |
| | Single cargo | | G25427 | | 0.10 |
| | | | | Sp Cas9 | 0.20 |
| | | | | UGI | 0.10 |

[0603] C5BL/6 male mice, ranging 6-10 weeks of age were used in each study involving mice (n=5 per group, except TSS control n=4). LNPs and AAVs were administered intravenously via tail vein injection at the doses shown in Table 14. Animals were periodically observed for adverse effects for at least 24 hours post-dose. Interim in-life tail bleeds were performed at 1, 2, and 4 weeks post dose to quantify hA1AT protein in mouse serum by ELISA analysis. Briefly, the hA1AT serum levels were determined using an Aviva Alpha 1-antiTrypsin ELISA kit, Human (Catalog #OKIA00048) according to the manufacturer's protocol. Mouse serum was diluted to a final dilution of 10,000-fold with 1× assay diluent. This was done by carrying out two sequential 50-fold dilutions resulting in a 2500-fold dilution. A final 4-fold dilution step was carried out for a total sample dilution of 10,000-fold. Both standard curve dilutions (100 μL each) and diluted serum samples were added to each well of the ELISA plate pre-coated with capture antibody. The plate was incubated at room temperature for 30 minutes before washing. Enzyme-antibody conjugate (100 μL per well) was added for a 20-minute incubation. Unbound antibody conjugate was removed and the plate was washed again before the addition of the chromogenic substrate solution. The plate was incubated for 10 minutes before adding 100 μL of the stop solution, e.g., sulfuric acid (approximately 0.3 M). The plate was read on a SpectraMax M5 or Clariostar plate reader at an absorbance of 450 nm. Serum TTR levels were calculated by SoftMax Pro software ver. 6.4.2 or Mars software ver. 3.31 using a four-parameter logistic curve fit off the standard curve. Final serum values were adjusted for the assay dilution. Percent protein knockdown (% KD) values were determined relative to controls, which generally were animals sham-treated with vehicle (TSS) unless otherwise indicated.

[0604] Animals were euthanized five weeks post-injection by cardiac puncture under isoflurane anesthesia; liver tissue were collected for downstream analysis. Liver punches weighing between 5 and 15 mg were collected for isolation of genomic DNA and total RNA. Genomic DNA was extracted using a DNA isolation kit (ZymoResearch, D3010) and samples were analyzed with NGS sequencing as described in Example 1. The TTR editing efficiency for LNPs containing the indicated gRNAs are shown in Table 15 and FIG. 7A. Albumin editing efficiency is shown in Table 16 and FIG. 71B. Serum protein levels of hA1AT are shown in Table 17 and FIG. 7C.

TABLE 15
Mean percent TTR editing in mouse liver.

| | C-to-T % | | C-to-A/G % | | Indel % | | |
|---|---|---|---|---|---|---|---|
| | Mean | SD | Mean | SD | Mean | SD | n |
| TSS | 0.12 | 0.25 | 1.97 | 0.16 | 0.10 | 0.10 | 5 |
| Nme2Cas9 insertion | 24.67 | 0.05 | 1.93 | 0.25 | 0.09 | 0.12 | 5 |
| only | | | | | | | |
| Spy BE only | 49.24 | 1.16 | 4.90 | 0.22 | 17.29 | 0.88 | 5 |
| Nme2Cas9 insertion + | 21.86 | 1.68 | 4.94 | 0.22 | 17.41 | 1.23 | 4 |
| Spy BE | | | | | | | |
| SpyCas9 only | 0.03 | 0.01 | 0.62 | 0.08 | 70.75 | 1.23 | 5 |
| Nme2Cas9 insertion + | 0.05 | 0.03 | 0.67 | 0.15 | 71.99 | 2.77 | 5 |
| SpyCas9 | | | | | | | |

TABLE 16
Mean percent albumin editing in mouse liver.

| | C-to-T % | | | C-to-A/G % | | | Indel % | | |
|---|---|---|---|---|---|---|---|---|---|
| | Mean | SD | n | Mean | SD | n | Mean | SD | n |
| TSS | 0.05 | 0.04 | 5 | 1.49 | 0.22 | 5 | 0.13 | 0.21 | 5 |
| Nme2Cas9 insertion | 0.02 | 0.01 | 5 | 0.65 | 0.08 | 5 | 46.58 | 0.60 | 5 |
| only | | | | | | | | | |
| Spy BE only | 0.06 | 0.02 | 5 | 1.29 | 0.07 | 5 | 0.07 | 0.04 | 5 |
| Nme2Cas9 insertion + | 0.03 | 0.03 | 5 | 0.85 | 0.37 | 5 | 51.42 | 3.02 | 4 |
| Spy BE | | | | | | | | | |
| SpyCas9 only | 0.07 | 0.02 | 5 | 1.30 | 0.08 | 5 | 0.03 | 0.02 | 5 |
| Nme2Cas9 insertion + | 0.01 | 0.01 | 3 | 0.57 | 0.16 | 3 | 51.44 | 3.75 | 3 |
| SpyCas9 | | | | | | | | | |

TABLE 17
Serum protein levels of hA1AT.

| | Weeks | Mean | SD | n |
|---|---|---|---|---|
| TSS | 1 | 0 | 0 | 5 |
| | 2 | 0 | 0 | 5 |
| | 4 | 0 | 0 | 5 |
| Nme2Cas9 insertion | 1 | 2179.22 | 326.30 | 5 |
| only | 2 | 2220.62 | 333.81 | 5 |
| | 4 | 3619.96 | 598.05 | 5 |
| Spy BE only | 1 | 0 | 0 | 5 |
| | 2 | 0 | 0 | 5 |
| | 4 | 0 | 0 | 5 |
| Nme2Cas9 insertion + | 1 | 2347.69 | 188.48 | 5 |
| Spy BE | 2 | 2158.60 | 196.80 | 4 |
| | 4 | 3183.90 | 709.25 | 4 |
| SpyCas9 only | 1 | 0 | 0 | 5 |
| | 2 | 0 | 0 | 5 |
| | 4 | 0 | 0 | 5 |
| Nme2Cas9 insertion + | 1 | 2486.46 | 271.82 | 5 |
| SpyCas9 | 2 | 2629.86 | 238.45 | 5 |
| | 4 | 4201.42 | 582.27 | 5 |

### Example 6. Screening of Insertion Guide RNAs with Gapped AAV Templates and SpyCas9

[0605] AAVS1 guide RNAs were designed and screened to identify insertion SpyCas9 guides using a series of gapped AAV GFP templates (A, B, C, D, OG) each designed for a subset of the guide RNAs. Insertion efficacy in T cells was examined by assessing GFP expression by flow cytometry. The percentage of T cells positive for green fluorescent protein (“% GFP+”) was assayed by flow cytometry, following AAVS1 editing by mRNA and AAV delivery.

### Example 6.1. T Cell Preparation

[0606] Healthy human donor apheresis was obtained commercially (Hemacare) from two donors (#110042863 and #110040377) and cells were washed and resuspended in MACS Buffer containing 2 mM EDTA and 0.5% Fetal Bovine Serum (FBS) in PBS. Cells were washed twice by centrifugation followed by CD3 negative selection using Easy Sep Human T Cell Isolation Kit (Stemcell, Cat. 100-0695) and separated using Easy Sep Magnets (Stemcell, Cat.18000). T cells were aliquoted and cryopreserved for future use in Cryostor® CS10 (StemCell Technologies Cat. 07930).

### Example 6.2. RNP Electroporation of T Cells

[0607] AAVS1 guide RNAs were assessed for insertion efficacy in T cells by assessing GFP expression by flow cytometry. The percentage of T cells positive for green fluorescent protein (“% GFP+”) was assayed by flow cytometry, following AAVS1 editing by mRNA and AAV delivery.

[0608] AAVS1 targeting sgRNAs corresponding to the flanking homology regions of Gap Templates A, B, C, D, & OG (SEQ ID NOs: 299-303) were removed from their storage plates and denatured for 2 minutes at 95° C. before cooling at room temperature for 10 minutes. RNP mixture of 20 μM sgRNA and 10 μM Cas9-NLS protein (SEQ ID NO: 296) was prepared and incubated at 25° C. for 10 minutes. 2.5 μL of RNP mixture was combined with 250,000 cells in 20 μL P3 electroporation Buffer (Lonza). 22 μL of RNP/cell mix was transferred to the corresponding wells of a Lonza shuttle 96-well electroporation plate. Cells were electroporated in duplicate with the manufacturer's pulse code. T cell media described above without any cytokines was added to the cells immediately post electroporation. T cells were rested for 10 minutes at 37° C. Gap Template AAVs were prepared in 48 well plates (Corning, Cat.353078)) with T cell media described above containing 2× cytokines, 400 U/mL recombinant human interleukin-2 (Peprotech, Cat. 200-02), 10 ng/ml recombinant human interleukin 7 (Peprotech, Cat. 200-07), and 10 ng/ml recombinant human interleukin 15 (Peprotech, Cat. 200-15) cytokines. The multiplicity of infection (MOI) of AAVs was 3×10\hat{ }⁵. AAVs were added to the T cells within 15 minutes post electroporation and incubated for 48 hours at 37° C. AAV-6 vectors encoded AAVS1 Template A, B, C, D or OG. Two days post-electroporation, cells were split 1:2 in 48 well plates replenished with T cell media with 1× cytokines as described above. sgRNAs were tested each with AAV constructs and gapped template.

### Example 6.3. Flow Cytometry

[0609] On day 7 post-editing, cells were phenotyped by flow cytometry to determine GFP expression to confirm integration of AAV at their GAP template site. Briefly, T cells were washed in FACS buffer containing 2 mM EDTA (Invitrogen, Cat.15575020) and 1% FBS in PBS followed by re-suspending in FACS buffer containing 1:10,000 dilution of DAPI (Biolegend, Cat.422801) nuclear stain. Cells were then processed on a Cytoflex flow cytometer (Beckman Coulter) and analyzed using the FlowJo software package. T cells were gated based on size, shape, viability, and GFP expression. Values that were not determined by the flow cytometer were denoted as “ND”. Table 18 and FIGS. 8A-8B show mean percentage of T cells positive for GFP expression.

TABLE 18
Mean percentage of T cells positive for GFP expression
following genomic editing of AAVS1 with SpyCas9 and AAV

| | Guide | Donor 1 | | | Donor 2 | | |
|---|---|---|---|---|---|---|---|
| | ID | Mean | SD | N | Mean | SD | N |
| Controls | EP Only | 0.03 | ND | 1 | 0.04 | ND | 1 |
| | AAV | 6.81 | 0.18 | 2 | 8.31 | 0.785 | 2 |
| | Only | | | | | | |
| | TRAC | 52.05 | 1.95 | 2 | ND | ND | ND |
| Template A | G000562 | 30.60 | 0.10 | 2 | 41.20 | 13.6 | 2 |
| | G013562 | 65.75 | 0.45 | 2 | 62.35 | 0.95 | 2 |
| | G013563 | 73.15 | 0.25 | 2 | 69.40 | 0.9 | 2 |
| | G013564 | 65.95 | 0.45 | 2 | 61.20 | 0 | 2 |
| | G013582 | 66.30 | 0.10 | 2 | 61.00 | 0.3 | 2 |
| | G013584 | 69.15 | 0.15 | 2 | 62.95 | 3.95 | 2 |
| Template B | AAV | 8.44 | 1.07 | 2 | 9.74 | 0.23 | 2 |
| | Only | | | | | | |
| | G000562 | 34.00 | 0.10 | 2 | 32.75 | 2.35 | 2 |
| | G013559 | 65.55 | 0.35 | 2 | 64.05 | 2.65 | 2 |
| | G013562 | 63.60 | 0.90 | 2 | 65.40 | 0.2 | 2 |
| | G013563 | 69.15 | 0.65 | 2 | 71.35 | 0.35 | 2 |
| | G013564 | 61.50 | 1.10 | 2 | 63.45 | 0.55 | 2 |
| | G013565 | 63.50 | 0.40 | 2 | 65.00 | 1.1 | 2 |
| Template C | AAV | 7.98 | ND | 1 | 10.10 | ND | 1 |
| | Only | | | | | | |
| | G000562 | 57.95 | 0.15 | 2 | 59.10 | 0.9 | 2 |
| | G013515 | 61.15 | 0.65 | 2 | 60.95 | 1.15 | 2 |
| | G013533 | 65.65 | 0.35 | 2 | 65.15 | 0.25 | 2 |
| Template D | AAV | 7.12 | ND | 1 | 10.70 | ND | 1 |
| | Only | | | | | | |
| | G000562 | 29.65 | 1.15 | 2 | 27.50 | 0.7 | 2 |
| | G013519 | 73.35 | 0.45 | 2 | 72.10 | 0.9 | 2 |
| | G013520 | 71.80 | 0.20 | 2 | 72.20 | 1.3 | 2 |
| | G013523 | 70.50 | 0.60 | 2 | 72.05 | 0.55 | 2 |
| Template | AAV | 6.32 | ND | 1 | 6.87 | ND | 1 |
| OG | Only | | | | | | |
| | G000562 | 41.75 | 0.15 | 2 | 37.80 | 0.4 | 2 |
| | G013543 | 65.25 | 0.05 | 2 | 64.40 | 0.2 | 2 |

### Example 7. Orthogonal or Non-Orthogonal Multi-Edits

[0610] To assess the editing profile and cell behavior of cells undergoing simultaneous multiple edits using orthogonal editors or other editing schemes, T cells were treated with lipid nanoparticles (LNP) and analyzed for cell expansion, editing, and surface protein expression.

### Example 7.1. T Cell Preparation

[0611] Isolated, cryopreserved T cells were thawed on Day 0 in a water bath and plated at a density of 1.5×10\hat{ }6 cells/mL in TCAM media containing CTS OpTmizer T Cell Expansion SFM and T Cell Expansion Supplement (ThermoFisher Cat. A1048501), 1× Penicillin-Streptomycin, 1× Glutamax, 10 mM HEPES, 200 U/mL recombinant human interleukin-2 (Peprotech, Cat. 200-02), 5 ng/ml recombinant human interleukin 7 (Peprotech, Cat. 200-07), and 5 ng/ml recombinant human interleukin 15 (Peprotech, Cat. 200-15) and 2.5% human AB serum (GeminiBio, Cat. 100-512). Biological replicates were performed using isolated T cells from 3 donors.

### Example 7.2. LNP Treatment and Expansion of T Cells

[0612] LNPs were generally prepared as described in Example 1. Lipid nanoparticles in this example were prepared with molar ratios of 35 Lipid A: 47.5 cholesterol: 15 DSPC: 2.5 PEG2k-DMG. LNPs were made with a lipid amine to RNA phosphate (N:P) molar ratio of about 6. LNPs were formulated with a single RNA cargo or coformulated with multiple RNA species as described in Table 22. LNPs were delivered to T cells in TCAM media containing ApoE3 (Peprotech, Cat. 350-02) as described in Table 23 and below.

TABLE 22
Lipid Nanoparticles. Cargo mass ratios are listed respectively
to the order in the Cargo column. Dose is measured
as mass of total RNA cargo per unit volume.

| LNP | Dose (ug/ml) | Cargo | Cargo Mass Ratio |
|---|---|---|---|
| 1 | 0.84 | SpBC22n mRNA | n/a |
| 2 | 0.42 | UGI mRNA | n/a |
| 3 | 1.67 | TRAC G023520 + | 1:1.9:14.5:4.8 |
| | | TRBC G023524 + | |
| | | HLA-A G023523 + | |
| | | CIITA G023521 | |
| 4 | 1.25 | Nme2Cas9 mRNA + | 1:2 |
| | | TRAC G021469 | |
| 5 | 0.65 | SpCas9 mRNA + | 1:1 |
| | | CIITA G013675 | |
| 6 | 1.00 | SpCas9 mRNA + | 1:1 |
| | | TRAC G013006 | |
| 7 | 0.65 | SpCas9 mRNA + | 1:1 |
| | | HLA-A G018995 | |
| 8 | 1.00 | SpCas9 mRNA + | 1:1 |
| | | TRBC G016239 | |

[0613] Twenty-four hours post thawing (Day 1), cells were harvested and activated with TransAct™ (1:100 dilution, Miltenyi Biotec). LNPs were applied at the doses listed in Table 22 on the schedule provided in Table 23. Between treatments, cells were incubated at 37° C. As indicated in Table 23, on Day 3 Group C, Group D, and Group E were treated with 3×10⁵ GC/cell of AAV to deliver a homology directed repair template encoding a transgenic T cell receptor simultaneous with LNP treatments and with 0.25 uM of Compound 1. T cells were seeded at a density of 1E6 cells/mL for activation (Day 1) and sustained at a density of 0.5×10⁶/cells/mL throughout editing on Days 3-5.

TABLE 23
Order of editing for T cell engineering

| Treatment | Day 1 | Day 3 | Day 4 | Day 5 |
|---|---|---|---|---|
| Group A | none | none | none | none |
| Unedited | | | | |
| Group B | none | LNP1 | none | none |
| Simultaneous | none | LNP2 | none | none |
| Sp Base Editor | none | LNP3 | none | none |
| Group C | none | LNP1 | none | none |
| Simultaneous | none | LNP2 | none | none |
| Sp Base Editor + | none | LNP3 | none | none |
| Nme2Cas9 | none | LNP4 | none | none |
| insertion | none | AVV: TCR | none | none |
| Group D | none | LNP5 | none | none |
| Simultaneous | none | LNP6 | none | none |
| SpCas9 | none | LNP7 | none | none |
| | none | LNP8 | none | none |
| | none | AAV: TCR | none | none |
| Group E | LNP5 | LNP6 | LNP7 | LNP8 |
| Sequential | none | AAV: TCR | none | none |
| SpCas9 | | | | |

[0614] On Day 5 for Groups A, B, C, and D and on Day 6 for Group E cells were washed and transferred to 6 well GREX plates (Wilson Wolf). Media was refreshed on days 7 and 10. Cells were counted using a Cellaca MX (Nexcelom) and fold expansion was calculated by dividing cell yield by the starting material activated on Day 1. Table 24 and FIG. 9 show cell expansion after activation. After 9 days of expansion, Group C with four gene disruptions via base edit and a single DNA cleavage for insertion showed about five-fold better cell expansion compared to the simultaneous multi-cleavage Group D and the sequential multi-cleavage Group E.

TABLE 24
Cell population expansion after indicated growth period in expansion media.

| | Group A | | Group B | | Group C | | Group D | | Group E | |
|---|---|---|---|---|---|---|---|---|---|---|
| Days | Mean | SD | Mean | SD | Mean | SD | Mean | SD | Mean | SD |
| 1 | 1.0 | 0.0 | 1.0 | 0.0 | 1.0 | 0.0 | 1.0 | 0.0 | 1.0 | 0.0 |
| 3 | 1.5 | 0.1 | 1.5 | 0.1 | 1.5 | 0.2 | 1.4 | 0.0 | 1.2 | 0.1 |
| 5 | 10.8 | 1.2 | 8.0 | 0.8 | 4.0 | 0.7 | 2.7 | 0.5 | 2.9 | 0.6 |
| 8 | 118.8 | 13.6 | 108.4 | 20.2 | 57.6 | 7.6 | 13.1 | 4.2 | 10.6 | 7.0 |
| 9 | 202.2 | 9.9 | 186.2 | 28.9 | 120.4 | 17.2 | 24.4 | 6.6 | 22.1 | 13.9 |
| 11 | | | | | | | 54.0 | 16.1 | 63.4 | 38.9 |

[0615] On Day 9 or Day 11 of expansion growth, cells were harvested and analyzed by flow cytometry. For flow cytometric analysis, cells were washed in FACS buffer (PBS+2% FBS+2 mM EDTA). Engineered T cells were incubated in a cocktail of antibodies targeting CD4 (Biolegend 317434), CD8 (Biolegend 301046), CD3 (Biolegend 300430), Vb8 (Biolegend 348104), HLA-A2 (Biolegend 343320) or HLA-A3 (Fisher 50-112-3136) and HLA-DR, DP, DQ (Biolegend 361712). T cells were subsequently washed and analyzed on a Cytoflex instrument (Beckman Coulter). Data analysis was performed using FlowJo software package (v.10.6.1). T cells were gated on size, single cells, CD4 or CD8 expression, and expression of markers indicated in Table 25. Flow cytometry data shown in Table 25 and FIGS. 10A-B. Vb8+ levels indicate insertion and expression of the transgenic TCR in Groups C, D, and E. Efficient CIITA disruption in Groups B, C, D, and E is indicated by the increase in HLA-DR, DP, DQ-cells compared to Group A, as CIITA is a transcription factor that controls the expression of these surface proteins. Efficient HLA-A disruption is indicated by the increased HLA-A-population in in Groups B, C, D, and E compared to Group A. Efficient disruption of the TRAC and TRBC loci is indicated by the decrease in CD3+Vb8− in Groups B, C, D, and E compared to Group A. The percent of fully edited product was gated as HLA-A-, HLA-DR/DP/DQ-, CD3+, Vb8+.

TABLE 25
Mean percent of T cells displaying cell surface phenotype

| T cell | Additional | Group A | | Group B | | Group C | | Group D | | Group E | |
|---|---|---|---|---|---|---|---|---|---|---|---|
| type | Markers | Mean | SD | Mean | SD | Mean | SD | Mean | SD | Mean | SD |
| CD4+ | HLA-A− | 0.3 | 0.3 | 99.5 | 0.3 | 99.9 | 0.2 | 95.0 | 5.1 | 95.4 | 4.7 |
| | HLA- | 50.5 | 15.2 | 97.6 | 1.0 | 98.7 | 0.8 | 97.8 | 0.4 | 98.9 | 0.4 |
| | DR/DP/DQ− | | | | | | | | | | |
| | CD3 + Vb8− | 93.7 | 0.9 | 0.4 | 0.5 | 0.1 | 0.1 | 0.2 | 0.1 | 0.2 | 0.3 |
| | Vb8+ | 6.0 | 1.0 | 0.0 | 0.0 | 83.9 | 7.9 | 90.6 | 1.7 | 88.0 | 1.9 |
| | HLA-A−, | 0.0 | 0.0 | 0.0 | 0.0 | 83.2 | 8.1 | 84.9 | 6.8 | 83.5 | 6.0 |
| | HLA- | | | | | | | | | | |
| | DR/DP/DQ−, | | | | | | | | | | |
| | Vb8+, CD3+ | | | | | | | | | | |
| CD8+ | HLA-A− | 0.3 | 0.5 | 99.3 | 0.3 | 99.7 | 0.5 | 93.6 | 9.1 | 95.7 | 6.1 |
| | HLA- | 23.8 | 15.3 | 94.7 | 3.3 | 96.6 | 3.0 | 94.5 | 2.2 | 97.8 | 0.8 |
| | DR/DP/DQ− | | | | | | | | | | |
| | CD3+ Vb8− | 94.7 | 1.5 | 0.8 | 0.6 | 0.1 | 0.1 | 0.2 | 0.3 | 0.0 | 0.1 |
| | Vb8+ | 5.1 | 1.4 | 0.1 | 0.1 | 82.7 | 8.4 | 90.2 | 1.8 | 87.1 | 4.3 |
| | HLA-A−, | 0.0 | 0.0 | 0.0 | 0.1 | 80.2 | 9.4 | 81.2 | 7.1 | 82.2 | 8.6 |
| | HLA- | | | | | | | | | | |
| | DR/DP/DQ−, | | | | | | | | | | |
| | Vb8+, CD3+ | | | | | | | | | | |

### Example 8. Functional Characterization of Orthogonally Engineered T Cells

[0616] To assess the functionality of cells engineered with orthogonal editors, cells were analyzed for editing, surface protein expression, and cytotoxicity.

### Example 8.1. T Cell Preparation

[0617] Isolated, cryopreserved T cells were thawed in a water bath and plated at a density of 1.5×10⁶ cells/mL in TCAM media containing CTS OpTmizer T Cell Expansion SFM and T Cell Expansion Supplement (ThermoFisher Cat. A1048501), 1× Penicillin-Streptomycin, 1× Glutamax, 10 mM HEPES, 200 U/mL recombinant human interleukin-2 (Peprotech, Cat. 200-02), 5 ng/ml recombinant human interleukin 7 (Peprotech, Cat. 200-07), and 5 ng/ml recombinant human interleukin 15 (Peprotech, Cat. 200-15) and 2.5% human AB serum (GeminiBio, Cat. 100-512).

### Example 8.2. T Cell Engineering

[0618] LNPs were generally prepared as described in Example 1. Lipid nanoparticles in this example were prepared with molar ratios of 35 Lipid A: 47.5 cholesterol: 15 DSPC: 2.5 PEG2k-DMG. LNPs were made with a lipid amine to RNA phosphate (N:P) molar ratio of about 6. LNPs were formulated with a single RNA species or coformulated with multiple RNA species as described in Table 26. LNPs were delivered to T cells in TCAM media containing ApoE3 (Peprotech, Cat. 350-02) as described in Table 27 and below.

TABLE 26
Lipid Nanoparticles. Cargo mass ratios are listed respectively
to the order in the Cargo column. Dose is measured
as mass of total RNA cargo per unit volume.

| LNP | Dose (ug/ml) | Cargo | Cargo MassRatio |
|---|---|---|---|
| 1 | 0.25 | Spy BC22 mRNA | n/a |
| 2 | 0.5 | UGI mRNA | n/a |
| 3 | 1.67 | TRAC G027891 | 4.5/8.7/21.4/65.4 |
| | | TRBC G027904 | |
| | | CIITA G028535 | |
| | | HLA-A G028536 | |
| 4 | 1.25 | Nme2Cas9 mRNA + TRAC | 1:2 |
| | | G021469 | |

[0619] On Day 1 (e.g. 24 hours post thaw) cells were harvested and activated with TransAct™ (1:100 dilution, Miltenyi Biotec). LNPs were applied at the doses listed in Table 26 on Day 3 to the treatment groups as listed in Table 27. Group C samples were treated with 3E+5 GC/mL of AAV encoding a transgenic T cell receptor (AAV 1760 with HD1 Insert) and with 0.5 uM of Compound 1 simultaneous with LNP treatments.

TABLE 27
Editing regime for T cell engineering.

| Treatment | Day 3 |
|---|---|
| Group A | none |
| Unedited | |
| Group B | LNP1 |
| Sp Base Editor | LNP2 |
| | LNP3 |
| Group C | LNP1 |
| Sp Base Editor + | LNP2 |
| Nme2 Cas9 | LNP3 |
| insertion | LNP4 |
| | AAV |

[0620] On Day 4, cells were transferred to 6 well GREX plates (Wilson Wolf) with T cell expansion media (TCEM): CTS OpTmizer (Thermofisher, Cat. A3705001) supplemented with 5% human AB serum, 1× GlutaMAX (Thermofisher, Cat. 35050061), 10 mM HEPES, 200 U/mL IL-2 (Peprotech, Cat. 200-02), IL-7 (Peprotech, Cat. 200-07), and IL-15 (Peprotech, Cat. 200-15). Media was refreshed regularly. On Day 7, a portion of cells were harvested for sequencing analysis at TRBC1, TRBC2 and CIITA loci. NGS analysis was performed with technical triplicates as described in Example 1. Table 28 and FIG. 11A-11C show mean percent editing for these cells.

TABLE 28
Mean percent editing. “Cas9” indicates guides specific
to Nme2Cas9. “BE” indicates a guide designed for SpyBC22n
base editor. “n/a” indicates standard deviation is not applicable.

| | | C to T | | | C to A/G | | | Indels | | |
|---|---|---|---|---|---|---|---|---|---|---|
| Edit | Treatment | Mean | SD | n | Mean | SD | n | Mean | SD | n |
| G027891 | Group A | 0.3 | 0.1 | 5 | 0.7 | 0.1 | 5 | 0.2 | 0.0 | 5 |
| TRAC BE | Group B | 94.5 | 0.8 | 5 | 2.2 | 0.2 | 5 | 1.8 | 0.5 | 5 |
| | Group C | 95.3 | 1.0 | 6 | 1.9 | 0.4 | 6 | 0.9 | 0.2 | 6 |
| G027904 | Group A | 0.3 | 0.1 | 3 | 1.6 | 0.1 | 3 | 0.2 | 0.0 | 3 |
| TRBC1 | Group B | 92.9 | 1.2 | 3 | 5.6 | 0.5 | 3 | 1.2 | 0.7 | 3 |
| BE | Group C | 90.8 | 3.1 | 4 | 6.5 | 3.1 | 4 | 1.6 | 1.9 | 4 |
| G027904 | Group A | 0.3 | 0.3 | 4 | 1.9 | 0.2 | 3 | 0.2 | 0.0 | 3 |
| TRBC2 | Group B | 89.6 | 1.8 | 4 | 7.0 | 3.0 | 4 | 1.5 | 0.8 | 4 |
| BE | Group C | 90.5 | 3.9 | 5 | 6.9 | 2.8 | 5 | 1.6 | 1.7 | 5 |
| G028535 | Group A | 0.3 | n/a | 1 | 2.8 | 1.4 | 3 | 1.2 | 1.0 | 3 |
| CIITA | Group B | 92.3 | 0.1 | 2 | 2.6 | 1.6 | 4 | 1.3 | 1.4 | 4 |
| BE | Group C | 92.9 | 0.6 | 3 | 3.9 | 0.1 | 3 | 1.6 | 0.6 | 3 |

[0621] On Day 11, cells were counted using a Cellaca MX (Nexcelom) in technical triplicates and fold expansion was calculated by dividing cell yield by the amount of edited cells on Day 3. Table 29 shows fold cell expansion.

TABLE 29
Fold expansion of cell population.

| Treatment | Fold | SD | n |
|---|---|---|---|
| Group A | 218 | 12 | 6 |
| Group B | 173 | 9 | 6 |
| Group C | 110 | 4 | 6 |

### Example 8.3 Flow Cytometry

[0622] On Day 11, cells were harvested for analysis by flow cytometry (technical triplicates). For flow cytometric analysis, cells were washed in FACS buffer (PBS+2% FBS+2 mM EDTA). Engineered T cells were incubated in a cocktail of antibodies targeting CD4 (Biolegend 317434), CD8 (Biolegend 301046), CD3 (Biolegend 300430), Vb8 (Biolegend 348104), HLA-A2 (Biolegend 343320), HLA-A3 (Thermo Fisher Scientific, 501122136), HLA-DR, DP, DQ (Biolegend 361712), CD45RA (Biolegend, 304134), CD45RO (Biolegend, 304230), CD62L (Biolegend, 304820), CCR7 (Biolegend, 353214) and ViaKrome 808 Fixable Viablility Dye (Beckman Coulter, C36628). T cells were subsequently washed and analyzed on a Cytoflex instrument (Beckman Coulter). Data analysis was performed using FlowJo software package (v.10.6.1). T cells were gated on size, viability, CD4 or CD8 expression, and expression of markers indicated in Table 30. Flow cytometry data for CD8+ cells are shown in Table 30 and FIGS. 12A-12B and 13A-13C. Results for CD4+ cells were similar to CD8+ cells. HLA-A2-, HLA-A3- and HLA-DP, DQ, DQ-cell populations indicate efficient disruption of HLA-A locus, and CIITA locus, respectively in Group B and Group C compared to unedited control Group A. To determine endogenous TCR disruption resulting from TRAC and TRBC loci editing (referred to as “CD3−” in Table 30 and FIG. 12A) the % of cells expressing endogenous TCR (CD3+Vb8−) was subtracted from 1000. The increase in the Vb8+ cell population in Group C compared to Group A and Group B indicates effective insertion of the transgenic TCR. The similarity in CD45RA+ and CD45RO+ phenotypes between Group A and Group C shown in Table 30 and FIGS. 13A-13C indicates that the central memory cell, central memory stem cell, and effector memory phenotypes are intact for the engineered cells.

TABLE 30
Mean percent of CD8+ T cells displaying cell surface phenotype.

| Phenotype | Treatment | Mean | SD | n |
|---|---|---|---|---|
| “CD3−” | Group A | 4.1 | 2.5 | 6 |
| (100%-CD3+Vb8−) | Group B | 99.1 | 0.1 | 6 |
| | Group C | 99.5 | 0.0 | 6 |
| HLA-DP, DQ, DR− | Group A | 29.2 | 2.8 | 6 |
| | Group B | 94.9 | 0.3 | 6 |
| | Group C | 95.9 | 0.1 | 6 |
| HLA-A2− | Group A | 1.5 | 0.4 | 6 |
| | Group B | 98.2 | 0.2 | 6 |
| | Group C | 100.0 | 0.0 | 6 |
| HLA-A3− | Group A | 2.4 | 1.5 | 6 |
| | Group B | 98.5 | 0.1 | 6 |
| | Group C | 99.2 | 0.1 | 6 |
| Vb8+ | Group A | 5.6 | 0.3 | 6 |
| | Group B | 0.0 | 0.0 | 6 |
| | Group C | 76.4 | 0.3 | 6 |
| CD45RA+CCR7−CD62L+ | Group A | 12.8 | 1.3 | 6 |
| | Group B | 4.4 | 5.2 | 6 |
| | Group C | 12.1 | 0.3 | 6 |
| CD45RA+CCR7+CD62L+ | Group A | 32.1 | 2.9 | 6 |
| | Group B | 36.9 | 24.1 | 6 |
| | Group C | 39.9 | 1.3 | 6 |
| CD45RO+CCR7−CD62L+ | Group A | 29.2 | 1.0 | 6 |
| | Group B | 16.3 | 14.0 | 6 |
| | Group C | 18.5 | 0.4 | 6 |
| CD45RO+CCR7+CD62L+ | Group A | 17.7 | 1.5 | 6 |
| | Group B | 22.3 | 17.6 | 6 |
| | Group C | 22.8 | 0.7 | 6 |
| CD45RO+CCR7+CD62L− | Group A | 0.5 | 0.2 | 6 |
| | Group B | 5.1 | 8.4 | 6 |
| | Group C | 1.3 | 0.1 | 6 |
| CD45RO+CCR7−CD62L− | Group A | 1.4 | 0.5 | 6 |
| | Group B | 2.6 | 4.3 | 6 |
| | Group C | 3.3 | 0.1 | 6 |

### Example 8.4. Luciferase-Based Cytotoxicity Analysis

[0623] Treatment Group C cells were thawed and cultured overnight. Cells were co-cultured at an effector-to-target ratios indicated in Table 31 with 697 Luc GFP+ cells. Co-cultures were performed in a cytokine-free media composed of CTS OpTmizer T Cell Expansion SFM and T Cell Expansion Supplement (ThermoFisher Cat. A1048501), 2.5% human AB serum (GeminiBio, Cat. 100-512) 1× Penicillin-Streptomycin, 1× Glutamax, and 10 mM HEPES.

[0624] After 24 and 48 hours, the amount of luciferase enzyme produced by live 697 cells, which is inversely proportional to engineered T cytotoxicity, was measured by the Bright-Glo assay (Promega Cat. E2620) following the manufacturer's instructions. Luminescence was measured using a CLARIOstar Plus (BMG LabTech Sr. No. 430-4346) plate reader. The percentage specific killing was calculated as 100%−(100*experimental well luminescence/average target only well luminescence). Table 31 and FIG. 14 show mean percent cell killing at various effector to target ratios.

TABLE 31
Mean percent target cell killing by engineered T cells.

| | 24 hours | | | 48 hours | | |
|---|---|---|---|---|---|---|
| E:T | Mean | SD | n | Mean | SD | n |
| 4:1 | 79.7 | 0.7 | 3 | 98.2 | 9.6 | 3 |
| 2:1 | 65.4 | 2.2 | 3 | 95.4 | 4.3 | 3 |
| 1:1 | 46.1 | 2.1 | 3 | 82.2 | 5.9 | 3 |
| 1:2 | 41.1 | 2.2 | 3 | 65.0 | 2.8 | 3 |
| 1:4 | 35.6 | 1.2 | 3 | 59.7 | 6.1 | 3 |
| 1:8 | 12.2 | 0.9 | 3 | 38.2 | 1.6 | 3 |
| 1:16 | 10.3 | 1.1 | 3 | 34.7 | 1.2 | 3 |
| 1:32 | 3.9 | 2.1 | 3 | 28.7 | 1.3 | 3 |
| Target only | 1.5 | 1.7 | 3 | −0.3 | 2.0 | 3 |

### Example 9. Editing with Select Guides Using SpCas9 and Nme2 Base Editor

[0625] To assess editing with select guides using SpyCas9 and Nme2 base editor, engineered cells were evaluated by flow cytometry and NGS. This example includes selected guide concentrations and Nme2 BC22 mRNA concentrations.

### Example 9.1. T Cell Preparation

[0626] Isolated, cryopreserved T cells were thawed in a water bath and plated at a density of 1×10⁶ cells/mL in TCAM media containing CTS OpTmizer T Cell Expansion SFM and T Cell Expansion Supplement (ThermoFisher Cat. A1048501), 1× Penicillin-Streptomycin, 1× Glutamax, 10 mM HEPES, 200 U/mL recombinant human interleukin-2 (Peprotech, Cat. 200-02), 5 ng/mL recombinant human interleukin 7 (Peprotech, Cat. 200-07), and 5 ng/mL recombinant human interleukin 15 (Peprotech, Cat. 200-15) and 2.5% human AB serum (GeminiBio, Cat. 100-512). Technical replicates were prepared using isolated T cells from multiple donors. Data shown is from a selected donor.

### Example 9.2. T Cell Engineering

[0627] LNPs were generally prepared as described in Example 1. Lipid nanoparticles in this example were prepared with molar ratios of 35 Lipid A: 47.5 cholesterol: 15 DSPC: 2.5 PEG2k-DMG. LNPs were made with a lipid amine to RNA phosphate (N:P) molar ratio of about 6. LNPs were formulated with a single RNA species or coformulated with multiple RNA species as described in Table 32. LNPs were delivered to T cells in TCAM media containing ApoE3 (Peprotech, Cat. 350-02) as described in Table 32.

TABLE 32
Lipid Nanoparticles. Cargo mass ratios are listed respectively
to the order in the Cargo column. Dose is measured
as mass of total RNA cargo per unit volume.

| LNP | Dose (ug/ml) | Cargo | Cargo Mass Ratio |
|---|---|---|---|
| 1 | — | NmeBC22n mRNA | n/a |
| 2 | 0.5 | UGI mRNA | n/a |
| 3 | 0.32 | G028986(TRBC) | n/a |
| 4 | 0.68 | G026584 (CIITA) | n/a |
| 5 | 0.21 | G028907 (HLA-A/ | n/a |
| | | HLA-B) | |
| 6 | 1 | Spy Cas9 mRNA + | 1:1 |
| | | G013006 (TRAC) | |

[0628] On Day 1 (e.g., about 24 hours post thaw) cells were harvested and activated with TransAct™ (1:100 dilution, Miltenyi Biotec). LNPs were applied at the doses listed in Table 32 on Day 3 along with 0.5 uM of Compound 1.

[0629] Beginning on Day 4, cells were split and media refreshed regularly. On Day 7, a portion of cells were harvested for sequencing analysis at TRAC, TRBC1, TRBC2 and CIITA loci. NGS analysis was performed as described in Example 1. Table 33 and FIG. 15 show mean percent editing for these cells.

TABLE 33
Mean percent editing.

| | | C to T | | | C to A/G | | | Indels | | |
|---|---|---|---|---|---|---|---|---|---|---|
| Guide | BE mRNA | Mean | SD | n | Mean | SD | n | Mean | SD | n |
| G013006 | 1.0 ug/mL | 4.9 | 0.6 | 3 | 0.2 | 0.1 | 3 | 91.4 | 1.9 | 3 |
| TRAC Cas9 | 0.5 ug/mL | 5.0 | 3.4 | 3 | 0.2 | 0.1 | 3 | 87.2 | 12.0 | 3 |
| G028986 | 1.0 ug/mL | 93.3 | 1.5 | 3 | 0.9 | 0.5 | 3 | 1.0 | 1.4 | 3 |
| TRBC1 BE | 0.5 ug/mL | 94.4 | 0.2 | 3 | 1.0 | 0.6 | 3 | 0.3 | 0.3 | 3 |
| G026584 | 1.0 ug/mL | 91.6 | 0.8 | 3 | 1.4 | 0.2 | 3 | 0.6 | 0.3 | 3 |
| CIITA BE | 0.5 ug/mL | 91.8 | 1.3 | 3 | 1.2 | 0.3 | 3 | 0.9 | 0.2 | 3 |

### Example 9.3 Flow Cytometry

[0630] On Day 9, cells were harvested for analysis by flow cytometry. For flow cytometric analysis, cells were washed in FACS buffer (PBS+2% FBS+2 mM EDTA). Engineered T cells were incubated in a cocktail of antibodies targeting CD4 (Biolegend 317434), CD8 (Biolegend 301046), CD3 (Biolegend 300430), HLA-A2 (Biolegend 343320), HLA-B7 (Miltenyi Biotec, 130-120-234), HLA-DR, DP, DQ (Biolegend 361712), and ViaKrome 808 Fixable Viablility Dye (Beckman Coulter, C36628). T cells were subsequently washed and analyzed on a Cytoflex instrument (Beckman Coulter). Data analysis was performed using FlowJo software package (v.10.6.1). T cells were gated on live single cells, CD8+ expression, and expression of markers indicated in Table 34. Flow cytometry data for CD8+ cells are shown in Table 34 and FIG. 16. CD3-, HLA-A2-, HLA-B7-, and HLA-DP, DQ, DQ-cell populations indicate efficient disruption of TRAC, TRBC1, and TRBC2 loci, HLA-A locus, HLA-B locus, and CIITA locus, respectively.

TABLE 34
Mean percent of CD8+ T cells
negative for surface protein expression.

| | 0.5 ug/ml Nme2 | | | 1.0 ug/ml Nme2 | | |
|---|---|---|---|---|---|---|
| | BC22 mRNA | | | BC22 mRNA | | |
| Phenotype | Mean | SD | n | Mean | SD | n |
| CD3− | 99 | 0 | 3 | 99 | 0 | 3 |
| HLA-A− | 95 | 1 | 3 | 94 | 0 | 3 |
| HLA-B7− | 60 | 1 | 3 | 58 | 1 | 3 |
| HLA-DP, DQ, DR− | 98 | 1 | 3 | 98 | 0 | 3 |

### Table of Sequences

[0631] In the following table, the terms “mA,” “mC,” “mU,” or “mG” are used to denote a nucleotide that has been modified with 2′-O-Me.

[0632] In the following table, each “N” is used to independently denote any nucleotide (e.g., A, U, T, C, G). In certain embodiments, the nucleotide is an unmodified RNA nucleotide residue, i.e., a ribose sugar and a phosphodiester backbone.

[0633] In the following table, a “*” is used to denote a PS modification. In this application, the terms A*, C*, U*, or G* may be used to denote a nucleotide that is linked to the next (e.g., 3′) nucleotide with a PS bond.

[0634] It is understood that if a DNA sequence (comprising Ts) is referenced with respect to an RNA, then Ts should be replaced with Us (which may be modified or unmodified depending on the context), and vice versa.

[0635] In the following table, single amino acid letter code is used to provide peptide sequences.

| SEQ | | |
|---|---|---|
| ID | | |
| NO | Description | Sequence |
| 1 | mRNA encoding | GGGAAGCUCAGAAUAAACGCUCAACUUUGGCCGGAUCUGCCACCA |
| | SpyCas9 BC22n | UGGAGGCCUCCCCCGCCUCCGGCCCCCGGCACCUGAUGGACCCCC |
| | | ACAUCUUCACCUCCAACUUCAACAACGGCAUCGGCCGGCACAAGA |
| | | CCUACCUGUGCUACGAGGUGGAGCGGCUGGACAACGGCACCUCCG |
| | | UGAAGAUGGACCAGCACCGGGGCUUCCUGCACAACCAGGCCAAGA |
| | | ACCUGCUGUGCGGCUUCUACGGCCGGCACGCCGAGCUGCGGUUCC |
| | | UGGACCUGGUGCCCUCCCUGCAGCUGGACCCCGCCCAGAUCUACC |
| | | GGGUGACCUGGUUCAUCUCCUGGUCCCCCUGCUUCUCCUGGGGCU |
| | | GCGCCGGCGAGGUGCGGGCCUUCCUGCAGGAGAACACCCACGUGC |
| | | GGCUGCGGAUCUUCGCCGCCCGGAUCUACGACUACGACCCCCUGU |
| | | ACAAGGAGGCCCUGCAGAUGCUGCGGGACGCCGGCGCCCAGGUGU |
| | | CCAUCAUGACCUACGACGAGUUCAAGCACUGCUGGGACACCUUCG |
| | | UGGACCACCAGGGCUGCCCCUUCCAGCCCUGGGACGGCCUGGACG |
| | | AGCACUCCCAGGCCCUGUCCGGCCGGCUGCGGGCCAUCCUGCAGA |
| | | ACCAGGGCAACUCCGGCUCCGAGACCCCCGGCACCUCCGAGUCCG |
| | | CCACCCCCGAGUCCGACAAGAAGUACUCCAUCGGCCUGGCCAUCG |
| | | GCACCAACUCCGUGGGCUGGGCCGUGAUCACCGACGAGUACAAGG |
| | | UGCCCUCCAAGAAGUUCAAGGUGCUGGGCAACACCGACCGGCACU |
| | | CCAUCAAGAAGAACCUGAUCGGCGCCCUGCUGUUCGACUCCGGCG |
| | | AGACCGCCGAGGCCACCCGGCUGAAGCGGACCGCCCGGCGGCGGU |
| | | ACACCCGGCGGAAGAACCGGAUCUGCUACCUGCAGGAGAUCUUCU |
| | | CCAACGAGAUGGCCAAGGUGGACGACUCCUUCUUCCACCGGCUGG |
| | | AGGAGUCCUUCCUGGUGGAGGAGGACAAGAAGCACGAGCGGCAC |
| | | CCCAUCUUCGGCAACAUCGUGGACGAGGUGGCCUACCACGAGAAG |
| | | UACCCCACCAUCUACCACCUGCGGAAGAAGCUGGUGGACUCCACC |
| | | GACAAGGCCGACCUGCGGCUGAUCUACCUGGCCCUGGCCCACAUG |
| | | AUCAAGUUCCGGGGCCACUUCCUGAUCGAGGGCGACCUGAACCCC |
| | | GACAACUCCGACGUGGACAAGCUGUUCAUCCAGCUGGUGCAGACC |
| | | UACAACCAGCUGUUCGAGGAGAACCCCAUCAACGCCUCCGGCGUG |
| | | GACGCCAAGGCCAUCCUGUCCGCCCGGCUGUCCAAGUCCCGGCGG |
| | | CUGGAGAACCUGAUCGCCCAGCUGCCCGGCGAGAAGAAGAACGGC |
| | | CUGUUCGGCAACCUGAUCGCCCUGUCCCUGGGCCUGACCCCCAAC |
| | | UUCAAGUCCAACUUCGACCUGGCCGAGGACGCCAAGCUGCAGCUG |
| | | UCCAAGGACACCUACGACGACGACCUGGACAACCUGCUGGCCCAG |
| | | AUCGGCGACCAGUACGCCGACCUGUUCCUGGCCGCCAAGAACCUG |
| | | UCCGACGCCAUCCUGCUGUCCGACAUCCUGCGGGUGAACACCGAG |
| | | AUCACCAAGGCCCCCCUGUCCGCCUCCAUGAUCAAGCGGUACGAC |
| | | GAGCACCACCAGGACCUGACCCUGCUGAAGGCCCUGGUGCGGCAG |
| | | CAGCUGCCCGAGAAGUACAAGGAGAUCUUCUUCGACCAGUCCAAG |
| | | AACGGCUACGCCGGCUACAUCGACGGCGGCGCCUCCCAGGAGGAG |
| | | UUCUACAAGUUCAUCAAGCCCAUCCUGGAGAAGAUGGACGGCACC |
| | | GAGGAGCUGCUGGUGAAGCUGAACCGGGAGGACCUGCUGCGGAA |
| | | GCAGCGGACCUUCGACAACGGCUCCAUCCCCCACCAGAUCCACCU |
| | | GGGCGAGCUGCACGCCAUCCUGCGGCGGCAGGAGGACUUCUACCC |
| | | CUUCCUGAAGGACAACCGGGAGAAGAUCGAGAAGAUCCUGACCU |
| | | UCCGGAUCCCCUACUACGUGGGCCCCCUGGCCCGGGGCAACUCCC |
| | | GGUUCGCCUGGAUGACCCGGAAGUCCGAGGAGACCAUCACCCCCU |
| | | GGAACUUCGAGGAGGUGGUGGACAAGGGCGCCUCCGCCCAGUCCU |
| | | UCAUCGAGCGGAUGACCAACUUCGACAAGAACCUGCCCAACGAGA |
| | | AGGUGCUGCCCAAGCACUCCCUGCUGUACGAGUACUUCACCGUGU |
| | | ACAACGAGCUGACCAAGGUGAAGUACGUGACCGAGGGCAUGCGG |
| | | AAGCCCGCCUUCCUGUCCGGCGAGCAGAAGAAGGCCAUCGUGGAC |
| | | CUGCUGUUCAAGACCAACCGGAAGGUGACCGUGAAGCAGCUGAA |
| | | GGAGGACUACUUCAAGAAGAUCGAGUGCUUCGACUCCGUGGAGA |
| | | UCUCCGGCGUGGAGGACCGGUUCAACGCCUCCCUGGGCACCUACC |
| | | ACGACCUGCUGAAGAUCAUCAAGGACAAGGACUUCCUGGACAAC |
| | | GAGGAGAACGAGGACAUCCUGGAGGACAUCGUGCUGACCCUGAC |
| | | CCUGUUCGAGGACCGGGAGAUGAUCGAGGAGCGGCUGAAGACCU |
| | | ACGCCCACCUGUUCGACGACAAGGUGAUGAAGCAGCUGAAGCGGC |
| | | GGCGGUACACCGGCUGGGGCCGGCUGUCCCGGAAGCUGAUCAACG |
| | | GCAUCCGGGACAAGCAGUCCGGCAAGACCAUCCUGGACUUCCUGA |
| | | AGUCCGACGGCUUCGCCAACCGGAACUUCAUGCAGCUGAUCCACG |
| | | ACGACUCCCUGACCUUCAAGGAGGACAUCCAGAAGGCCCAGGUGU |
| | | CCGGCCAGGGCGACUCCCUGCACGAGCACAUCGCCAACCUGGCCG |
| | | GCUCCCCCGCCAUCAAGAAGGGCAUCCUGCAGACCGUGAAGGUGG |
| | | UGGACGAGCUGGUGAAGGUGAUGGGCCGGCACAAGCCCGAGAAC |
| | | AUCGUGAUCGAGAUGGCCCGGGAGAACCAGACCACCCAGAAGGGC |
| | | CAGAAGAACUCCCGGGAGCGGAUGAAGCGGAUCGAGGAGGGCAU |
| | | CAAGGAGCUGGGCUCCCAGAUCCUGAAGGAGCACCCCGUGGAGAA |
| | | CACCCAGCUGCAGAACGAGAAGCUGUACCUGUACUACCUGCAGAA |
| | | CGGCCGGGACAUGUACGUGGACCAGGAGCUGGACAUCAACCGGCU |
| | | GUCCGACUACGACGUGGACCACAUCGUGCCCCAGUCCUUCCUGAA |
| | | GGACGACUCCAUCGACAACAAGGUGCUGACCCGGUCCGACAAGAA |
| | | CCGGGGCAAGUCCGACAACGUGCCCUCCGAGGAGGUGGUGAAGA |
| | | AGAUGAAGAACUACUGGCGGCAGCUGCUGAACGCCAAGCUGAUC |
| | | ACCCAGCGGAAGUUCGACAACCUGACCAAGGCCGAGCGGGGCGGC |
| | | CUGUCCGAGCUGGACAAGGCCGGCUUCAUCAAGCGGCAGCUGGUG |
| | | GAGACCCGGCAGAUCACCAAGCACGUGGCCCAGAUCCUGGACUCC |
| | | CGGAUGAACACCAAGUACGACGAGAACGACAAGCUGAUCCGGGA |
| | | GGUGAAGGUGAUCACCCUGAAGUCCAAGCUGGUGUCCGACUUCC |
| | | GGAAGGACUUCCAGUUCUACAAGGUGCGGGAGAUCAACAACUAC |
| | | CACCACGCCCACGACGCCUACCUGAACGCCGUGGUGGGCACCGCC |
| | | CUGAUCAAGAAGUACCCCAAGCUGGAGUCCGAGUUCGUGUACGG |
| | | CGACUACAAGGUGUACGACGUGCGGAAGAUGAUCGCCAAGUCCG |
| | | AGCAGGAGAUCGGCAAGGCCACCGCCAAGUACUUCUUCUACUCCA |
| | | ACAUCAUGAACUUCUUCAAGACCGAGAUCACCCUGGCCAACGGCG |
| | | AGAUCCGGAAGCGGCCCCUGAUCGAGACCAACGGCGAGACCGGCG |
| | | AGAUCGUGUGGGACAAGGGCCGGGACUUCGCCACCGUGCGGAAG |
| | | GUGCUGUCCAUGCCCCAGGUGAACAUCGUGAAGAAGACCGAGGU |
| | | GCAGACCGGCGGCUUCUCCAAGGAGUCCAUCCUGCCCAAGCGGAA |
| | | CUCCGACAAGCUGAUCGCCCGGAAGAAGGACUGGGACCCCAAGAA |
| | | GUACGGCGGCUUCGACUCCCCCACCGUGGCCUACUCCGUGCUGGU |
| | | GGUGGCCAAGGUGGAGAAGGGCAAGUCCAAGAAGCUGAAGUCCG |
| | | UGAAGGAGCUGCUGGGCAUCACCAUCAUGGAGCGGUCCUCCUUCG |
| | | AGAAGAACCCCAUCGACUUCCUGGAGGCCAAGGGCUACAAGGAG |
| | | GUGAAGAAGGACCUGAUCAUCAAGCUGCCCAAGUACUCCCUGUUC |
| | | GAGCUGGAGAACGGCCGGAAGCGGAUGCUGGCCUCCGCCGGCGAG |
| | | CUGCAGAAGGGCAACGAGCUGGCCCUGCCCUCCAAGUACGUGAAC |
| | | UUCCUGUACCUGGCCUCCCACUACGAGAAGCUGAAGGGCUCCCCC |
| | | GAGGACAACGAGCAGAAGCAGCUGUUCGUGGAGCAGCACAAGCA |
| | | CUACCUGGACGAGAUCAUCGAGCAGAUCUCCGAGUUCUCCAAGCG |
| | | GGUGAUCCUGGCCGACGCCAACCUGGACAAGGUGCUGUCCGCCUA |
| | | CAACAAGCACCGGGACAAGCCCAUCCGGGAGCAGGCCGAGAACAU |
| | | CAUCCACCUGUUCACCCUGACCAACCUGGGCGCCCCCGCCGCCUU |
| | | CAAGUACUUCGACACCACCAUCGACCGGAAGCGGUACACCUCCAC |
| | | CAAGGAGGUGCUGGACGCCACCCUGAUCCACCAGUCCAUCACCGG |
| | | CCUGUACGAGACCCGGAUCGACCUGUCCCAGCUGGGCGGCGACGG |
| | | CGGCGGCUCCCCCAAGAAGAAGCGGAAGGUGUGACUAGCACCAGC |
| | | CUCAAGAACACCCGAAUGGAGUCUCUAAGCUACAUAAUACCAACU |
| | | UACACUUUACAAAAUGUUGUCCCCCAAAAUGUAGCCAUUCGUAU |
| | | CUGCUCCUAAUAAAAAGAAAGUUUCUUCACAUUCUCUCGAGAAA |
| | | AAAAAAAAAUGGAAAAAAAAAAAACGGAAAAAAAAAAAAGGUAA |
| | | AAAAAAAAAAUAUAAAAAAAAAAAACAUAAAAAAAAAAAACGAA |
| | | AAAAAAAAAACGUAAAAAAAAAAAACUCAAAAAAAAAAAAGAUA |
| | | AAAAAAAAAAACCUAAAAAAAAAAAAUGUAAAAAAAAAAAAGGG |
| | | AAAAAAAAAAAACGCAAAAAAAAAAAACACAAAAAAAAAAAAUG |
| | | CAAAAAAAAAAAAUCGAAAAAAAAAAAAUCUAAAAAAAAAAAAC |
| | | GAAAAAAAAAAAACCCAAAAAAAAAAAAGACAAAAAAAAAAAAU |
| | | AGAAAAAAAAAAAAGUUAAAAAAAAAAAACUGAAAAAAAAAAAA |
| | | UUUAAAAAAAAAAAAUCUAG |
| 2 | Open reading | AUGGAGGCCUCCCCCGCCUCCGGCCCCCGGCACCUGAUGGACCCC |
| | frame for BC22n | CACAUCUUCACCUCCAACUUCAACAACGGCAUCGGCCGGCACAAG |
| | | ACCUACCUGUGCUACGAGGUGGAGCGGCUGGACAACGGCACCUCC |
| | | GUGAAGAUGGACCAGCACCGGGGCUUCCUGCACAACCAGGCCAAG |
| | | AACCUGCUGUGCGGCUUCUACGGCCGGCACGCCGAGCUGCGGUUC |
| | | CUGGACCUGGUGCCCUCCCUGCAGCUGGACCCCGCCCAGAUCUAC |
| | | CGGGUGACCUGGUUCAUCUCCUGGUCCCCCUGCUUCUCCUGGGGC |
| | | UGCGCCGGCGAGGUGCGGGCCUUCCUGCAGGAGAACACCCACGUG |
| | | CGGCUGCGGAUCUUCGCCGCCCGGAUCUACGACUACGACCCCCUG |
| | | UACAAGGAGGCCCUGCAGAUGCUGCGGGACGCCGGCGCCCAGGUG |
| | | UCCAUCAUGACCUACGACGAGUUCAAGCACUGCUGGGACACCUUC |
| | | GUGGACCACCAGGGCUGCCCCUUCCAGCCCUGGGACGGCCUGGAC |
| | | GAGCACUCCCAGGCCCUGUCCGGCCGGCUGCGGGCCAUCCUGCAG |
| | | AACCAGGGCAACUCCGGCUCCGAGACCCCCGGCACCUCCGAGUCC |
| | | GCCACCCCCGAGUCCGACAAGAAGUACUCCAUCGGCCUGGCCAUC |
| | | GGCACCAACUCCGUGGGCUGGGCCGUGAUCACCGACGAGUACAAG |
| | | GUGCCCUCCAAGAAGUUCAAGGUGCUGGGCAACACCGACCGGCAC |
| | | UCCAUCAAGAAGAACCUGAUCGGCGCCCUGCUGUUCGACUCCGGC |
| | | GAGACCGCCGAGGCCACCCGGCUGAAGCGGACCGCCCGGCGGCGG |
| | | UACACCCGGCGGAAGAACCGGAUCUGCUACCUGCAGGAGAUCUUC |
| | | UCCAACGAGAUGGCCAAGGUGGACGACUCCUUCUUCCACCGGCUG |
| | | GAGGAGUCCUUCCUGGUGGAGGAGGACAAGAAGCACGAGCGGCA |
| | | CCCCAUCUUCGGCAACAUCGUGGACGAGGUGGCCUACCACGAGAA |
| | | GUACCCCACCAUCUACCACCUGCGGAAGAAGCUGGUGGACUCCAC |
| | | CGACAAGGCCGACCUGCGGCUGAUCUACCUGGCCCUGGCCCACAU |
| | | GAUCAAGUUCCGGGGCCACUUCCUGAUCGAGGGCGACCUGAACCC |
| | | CGACAACUCCGACGUGGACAAGCUGUUCAUCCAGCUGGUGCAGAC |
| | | CUACAACCAGCUGUUCGAGGAGAACCCCAUCAACGCCUCCGGCGU |
| | | GGACGCCAAGGCCAUCCUGUCCGCCCGGCUGUCCAAGUCCCGGCG |
| | | GCUGGAGAACCUGAUCGCCCAGCUGCCCGGCGAGAAGAAGAACGG |
| | | CCUGUUCGGCAACCUGAUCGCCCUGUCCCUGGGCCUGACCCCCAA |
| | | CUUCAAGUCCAACUUCGACCUGGCCGAGGACGCCAAGCUGCAGCU |
| | | GUCCAAGGACACCUACGACGACGACCUGGACAACCUGCUGGCCCA |
| | | GAUCGGCGACCAGUACGCCGACCUGUUCCUGGCCGCCAAGAACCU |
| | | GUCCGACGCCAUCCUGCUGUCCGACAUCCUGCGGGUGAACACCGA |
| | | GAUCACCAAGGCCCCCCUGUCCGCCUCCAUGAUCAAGCGGUACGA |
| | | CGAGCACCACCAGGACCUGACCCUGCUGAAGGCCCUGGUGCGGCA |
| | | GCAGCUGCCCGAGAAGUACAAGGAGAUCUUCUUCGACCAGUCCAA |
| | | GAACGGCUACGCCGGCUACAUCGACGGCGGCGCCUCCCAGGAGGA |
| | | GUUCUACAAGUUCAUCAAGCCCAUCCUGGAGAAGAUGGACGGCA |
| | | CCGAGGAGCUGCUGGUGAAGCUGAACCGGGAGGACCUGCUGCGG |
| | | AAGCAGCGGACCUUCGACAACGGCUCCAUCCCCCACCAGAUCCAC |
| | | CUGGGCGAGCUGCACGCCAUCCUGCGGCGGCAGGAGGACUUCUAC |
| | | CCCUUCCUGAAGGACAACCGGGAGAAGAUCGAGAAGAUCCUGACC |
| | | UUCCGGAUCCCCUACUACGUGGGCCCCCUGGCCCGGGGCAACUCC |
| | | CGGUUCGCCUGGAUGACCCGGAAGUCCGAGGAGACCAUCACCCCC |
| | | UGGAACUUCGAGGAGGUGGUGGACAAGGGCGCCUCCGCCCAGUCC |
| | | UUCAUCGAGCGGAUGACCAACUUCGACAAGAACCUGCCCAACGAG |
| | | AAGGUGCUGCCCAAGCACUCCCUGCUGUACGAGUACUUCACCGUG |
| | | UACAACGAGCUGACCAAGGUGAAGUACGUGACCGAGGGCAUGCG |
| | | GAAGCCCGCCUUCCUGUCCGGCGAGCAGAAGAAGGCCAUCGUGGA |
| | | CCUGCUGUUCAAGACCAACCGGAAGGUGACCGUGAAGCAGCUGA |
| | | AGGAGGACUACUUCAAGAAGAUCGAGUGCUUCGACUCCGUGGAG |
| | | AUCUCCGGCGUGGAGGACCGGUUCAACGCCUCCCUGGGCACCUAC |
| | | CACGACCUGCUGAAGAUCAUCAAGGACAAGGACUUCCUGGACAAC |
| | | GAGGAGAACGAGGACAUCCUGGAGGACAUCGUGCUGACCCUGAC |
| | | CCUGUUCGAGGACCGGGAGAUGAUCGAGGAGCGGCUGAAGACCU |
| | | ACGCCCACCUGUUCGACGACAAGGUGAUGAAGCAGCUGAAGCGGC |
| | | GGCGGUACACCGGCUGGGGCCGGCUGUCCCGGAAGCUGAUCAACG |
| | | GCAUCCGGGACAAGCAGUCCGGCAAGACCAUCCUGGACUUCCUGA |
| | | AGUCCGACGGCUUCGCCAACCGGAACUUCAUGCAGCUGAUCCACG |
| | | ACGACUCCCUGACCUUCAAGGAGGACAUCCAGAAGGCCCAGGUGU |
| | | CCGGCCAGGGCGACUCCCUGCACGAGCACAUCGCCAACCUGGCCG |
| | | GCUCCCCCGCCAUCAAGAAGGGCAUCCUGCAGACCGUGAAGGUGG |
| | | UGGACGAGCUGGUGAAGGUGAUGGGCCGGCACAAGCCCGAGAAC |
| | | AUCGUGAUCGAGAUGGCCCGGGAGAACCAGACCACCCAGAAGGGC |
| | | CAGAAGAACUCCCGGGAGCGGAUGAAGCGGAUCGAGGAGGGCAU |
| | | CAAGGAGCUGGGCUCCCAGAUCCUGAAGGAGCACCCCGUGGAGAA |
| | | CACCCAGCUGCAGAACGAGAAGCUGUACCUGUACUACCUGCAGAA |
| | | CGGCCGGGACAUGUACGUGGACCAGGAGCUGGACAUCAACCGGCU |
| | | GUCCGACUACGACGUGGACCACAUCGUGCCCCAGUCCUUCCUGAA |
| | | GGACGACUCCAUCGACAACAAGGUGCUGACCCGGUCCGACAAGAA |
| | | CCGGGGCAAGUCCGACAACGUGCCCUCCGAGGAGGUGGUGAAGA |
| | | AGAUGAAGAACUACUGGCGGCAGCUGCUGAACGCCAAGCUGAUC |
| | | ACCCAGCGGAAGUUCGACAACCUGACCAAGGCCGAGCGGGGCGGC |
| | | CUGUCCGAGCUGGACAAGGCCGGCUUCAUCAAGCGGCAGCUGGUG |
| | | GAGACCCGGCAGAUCACCAAGCACGUGGCCCAGAUCCUGGACUCC |
| | | CGGAUGAACACCAAGUACGACGAGAACGACAAGCUGAUCCGGGA |
| | | GGUGAAGGUGAUCACCCUGAAGUCCAAGCUGGUGUCCGACUUCC |
| | | GGAAGGACUUCCAGUUCUACAAGGUGCGGGAGAUCAACAACUAC |
| | | CACCACGCCCACGACGCCUACCUGAACGCCGUGGUGGGCACCGCC |
| | | CUGAUCAAGAAGUACCCCAAGCUGGAGUCCGAGUUCGUGUACGG |
| | | CGACUACAAGGUGUACGACGUGCGGAAGAUGAUCGCCAAGUCCG |
| | | AGCAGGAGAUCGGCAAGGCCACCGCCAAGUACUUCUUCUACUCCA |
| | | ACAUCAUGAACUUCUUCAAGACCGAGAUCACCCUGGCCAACGGCG |
| | | AGAUCCGGAAGCGGCCCCUGAUCGAGACCAACGGCGAGACCGGCG |
| | | AGAUCGUGUGGGACAAGGGCCGGGACUUCGCCACCGUGCGGAAG |
| | | GUGCUGUCCAUGCCCCAGGUGAACAUCGUGAAGAAGACCGAGGU |
| | | GCAGACCGGCGGCUUCUCCAAGGAGUCCAUCCUGCCCAAGCGGAA |
| | | CUCCGACAAGCUGAUCGCCCGGAAGAAGGACUGGGACCCCAAGAA |
| | | GUACGGCGGCUUCGACUCCCCCACCGUGGCCUACUCCGUGCUGGU |
| | | GGUGGCCAAGGUGGAGAAGGGCAAGUCCAAGAAGCUGAAGUCCG |
| | | UGAAGGAGCUGCUGGGCAUCACCAUCAUGGAGCGGUCCUCCUUCG |
| | | AGAAGAACCCCAUCGACUUCCUGGAGGCCAAGGGCUACAAGGAG |
| | | GUGAAGAAGGACCUGAUCAUCAAGCUGCCCAAGUACUCCCUGUUC |
| | | GAGCUGGAGAACGGCCGGAAGCGGAUGCUGGCCUCCGCCGGCGAG |
| | | CUGCAGAAGGGCAACGAGCUGGCCCUGCCCUCCAAGUACGUGAAC |
| | | UUCCUGUACCUGGCCUCCCACUACGAGAAGCUGAAGGGCUCCCCC |
| | | GAGGACAACGAGCAGAAGCAGCUGUUCGUGGAGCAGCACAAGCA |
| | | CUACCUGGACGAGAUCAUCGAGCAGAUCUCCGAGUUCUCCAAGCG |
| | | GGUGAUCCUGGCCGACGCCAACCUGGACAAGGUGCUGUCCGCCUA |
| | | CAACAAGCACCGGGACAAGCCCAUCCGGGAGCAGGCCGAGAACAU |
| | | CAUCCACCUGUUCACCCUGACCAACCUGGGCGCCCCCGCCGCCUU |
| | | CAAGUACUUCGACACCACCAUCGACCGGAAGCGGUACACCUCCAC |
| | | CAAGGAGGUGCUGGACGCCACCCUGAUCCACCAGUCCAUCACCGG |
| | | CCUGUACGAGACCCGGAUCGACCUGUCCCAGCUGGGCGGCGACGG |
| | | CGGCGGCUCCCCCAAGAAGAAGCGGAAGGUGUGA |
| 3 | Amino acid | MEASPASGPRHLMDPHIFTSNFNNGIGRHKTYLCYEVERLDNGTSVKM |
| | sequence for | DQHRGFLHNQAKNLLCGFYGRHAELRFLDLVPSLQLDPAQIYRVTWFI |
| | BC22n | SWSPCFSWGCAGEVRAFLQENTHVRLRIFAARIYDYDPLYKEALQMLR |
| | | DAGAQVSIMTYDEFKHCWDTFVDHQGCPFQPWDGLDEHSQALSGRL |
| | | RAILQNQGNSGSETPGTSESATPESDKKYSIGLAIGTNSVGWAVITDEY |
| | | KVPSKKFKVLGNTDRHSIKKNLIGALLFDSGETAEATRLKRTARRRYT |
| | | RRKNRICYLQEIFSNEMAKVDDSFFHRLEESFLVEEDKKHERHPIFGNIV |
| | | DEVAYHEKYPTIYHLRKKLVDSTDKADLRLIYLALAHMIKFRGHFLIE |
| | | GDLNPDNSDVDKLFIQLVQTYNQLFEENPINASGVDAKAILSARLSKSR |
| | | RLENLIAQLPGEKKNGLFGNLIALSLGLTPNFKSNFDLAEDAKLQLSKD |
| | | TYDDDLDNLLAQIGDQYADLFLAAKNLSDAILLSDILRVNTEITKAPLS |
| | | ASMIKRYDEHHQDLTLLKALVRQQLPEKYKEIFFDQSKNGYAGYIDGG |
| | | ASQEEFYKFIKPILEKMDGTEELLVKLNREDLLRKQRTFDNGSIPHQIHL |
| | | GELHAILRRQEDFYPFLKDNREKIEKILTFRIPYYVGPLARGNSRFAWM |
| | | TRKSEETITPWNFEEVVDKGASAQSFIERMTNFDKNLPNEKVLPKHSLL |
| | | YEYFTVYNELTKVKYVTEGMRKPAFLSGEQKKAIVDLLFKTNRKVTV |
| | | KQLKEDYFKKIECFDSVEISGVEDRFNASLGTYHDLLKIIKDKDFLDNE |
| | | ENEDILEDIVLTLTLFEDREMIEERLKTYAHLFDDKVMKQLKRRRYTG |
| | | WGRLSRKLINGIRDKQSGKTILDFLKSDGFANRNFMQLIHDDSLTFKED |
| | | IQKAQVSGQGDSLHEHIANLAGSPAIKKGILQTVKVVDELVKVMGRHK |
| | | PENIVIEMARENQTTQKGQKNSRERMKRIEEGIKELGSQILKEHPVENT |
| | | QLQNEKLYLYYLQNGRDMYVDQELDINRLSDYDVDHIVPQSFLKDDSI |
| | | DNKVLTRSDKNRGKSDNVPSEEVVKKMKNYWRQLLNAKLITQRKFD |
| | | NLTKAERGGLSELDKAGFIKRQLVETRQITKHVAQILDSRMNTKYDEN |
| | | DKLIREVKVITLKSKLVSDFRKDFQFYKVREINNYHHAHDAYLNAVVG |
| | | TALIKKYPKLESEFVYGDYKVYDVRKMIAKSEQEIGKATAKYFFYSNI |
| | | MNFFKTEITLANGEIRKRPLIETNGETGEIVWDKGRDFATVRKVLSMPQ |
| | | VNIVKKTEVQTGGFSKESILPKRNSDKLIARKKDWDPKKYGGFDSPTV |
| | | AYSVLVVAKVEKGKSKKLKSVKELLGITIMERSSFEKNPIDFLEAKGYK |
| | | EVKKDLIIKLPKYSLFELENGRKRMLASAGELQKGNELALPSKYVNFL |
| | | YLASHYEKLKGSPEDNEQKQLFVEQHKHYLDEIIEQISEFSKRVILADA |
| | | NLDKVLSAYNKHRDKPIREQAENIIHLFTLTNLGAPAAFKYFDTTIDRK |
| | | RYTSTKEVLDATLIHQSITGLYETRIDLSQLGGDGGGSPKKKRKV |
| 4 | mRNA encoding | GGGAAGCUCAGAAUAAACGCUCAACUUUGGCCGGAUCUGCCACCA |
| | BC22n with Hibit | UGGAGGCCUCCCCCGCCUCCGGCCCCCGGCACCUGAUGGACCCCC |
| | tag | ACAUCUUCACCUCCAACUUCAACAACGGCAUCGGCCGGCACAAGA |
| | | CCUACCUGUGCUACGAGGUGGAGCGGCUGGACAACGGCACCUCCG |
| | | UGAAGAUGGACCAGCACCGGGGCUUCCUGCACAACCAGGCCAAGA |
| | | ACCUGCUGUGCGGCUUCUACGGCCGGCACGCCGAGCUGCGGUUCC |
| | | UGGACCUGGUGCCCUCCCUGCAGCUGGACCCCGCCCAGAUCUACC |
| | | GGGUGACCUGGUUCAUCUCCUGGUCCCCCUGCUUCUCCUGGGGCU |
| | | GCGCCGGCGAGGUGCGGGCCUUCCUGCAGGAGAACACCCACGUGC |
| | | GGCUGCGGAUCUUCGCCGCCCGGAUCUACGACUACGACCCCCUGU |
| | | ACAAGGAGGCCCUGCAGAUGCUGCGGGACGCCGGCGCCCAGGUGU |
| | | CCAUCAUGACCUACGACGAGUUCAAGCACUGCUGGGACACCUUCG |
| | | UGGACCACCAGGGCUGCCCCUUCCAGCCCUGGGACGGCCUGGACG |
| | | AGCACUCCCAGGCCCUGUCCGGCCGGCUGCGGGCCAUCCUGCAGA |
| | | ACCAGGGCAACUCCGGCUCCGAGACCCCCGGCACCUCCGAGUCCG |
| | | CCACCCCCGAGUCCGACAAGAAGUACUCCAUCGGCCUGGCCAUCG |
| | | GCACCAACUCCGUGGGCUGGGCCGUGAUCACCGACGAGUACAAGG |
| | | UGCCCUCCAAGAAGUUCAAGGUGCUGGGCAACACCGACCGGCACU |
| | | CCAUCAAGAAGAACCUGAUCGGCGCCCUGCUGUUCGACUCCGGCG |
| | | AGACCGCCGAGGCCACCCGGCUGAAGCGGACCGCCCGGCGGCGGU |
| | | ACACCCGGCGGAAGAACCGGAUCUGCUACCUGCAGGAGAUCUUCU |
| | | CCAACGAGAUGGCCAAGGUGGACGACUCCUUCUUCCACCGGCUGG |
| | | AGGAGUCCUUCCUGGUGGAGGAGGACAAGAAGCACGAGCGGCAC |
| | | CCCAUCUUCGGCAACAUCGUGGACGAGGUGGCCUACCACGAGAAG |
| | | UACCCCACCAUCUACCACCUGCGGAAGAAGCUGGUGGACUCCACC |
| | | GACAAGGCCGACCUGCGGCUGAUCUACCUGGCCCUGGCCCACAUG |
| | | AUCAAGUUCCGGGGCCACUUCCUGAUCGAGGGCGACCUGAACCCC |
| | | GACAACUCCGACGUGGACAAGCUGUUCAUCCAGCUGGUGCAGACC |
| | | UACAACCAGCUGUUCGAGGAGAACCCCAUCAACGCCUCCGGCGUG |
| | | GACGCCAAGGCCAUCCUGUCCGCCCGGCUGUCCAAGUCCCGGCGG |
| | | CUGGAGAACCUGAUCGCCCAGCUGCCCGGCGAGAAGAAGAACGGC |
| | | CUGUUCGGCAACCUGAUCGCCCUGUCCCUGGGCCUGACCCCCAAC |
| | | UUCAAGUCCAACUUCGACCUGGCCGAGGACGCCAAGCUGCAGCUG |
| | | UCCAAGGACACCUACGACGACGACCUGGACAACCUGCUGGCCCAG |
| | | AUCGGCGACCAGUACGCCGACCUGUUCCUGGCCGCCAAGAACCUG |
| | | UCCGACGCCAUCCUGCUGUCCGACAUCCUGCGGGUGAACACCGAG |
| | | AUCACCAAGGCCCCCCUGUCCGCCUCCAUGAUCAAGCGGUACGAC |
| | | GAGCACCACCAGGACCUGACCCUGCUGAAGGCCCUGGUGCGGCAG |
| | | CAGCUGCCCGAGAAGUACAAGGAGAUCUUCUUCGACCAGUCCAAG |
| | | AACGGCUACGCCGGCUACAUCGACGGCGGCGCCUCCCAGGAGGAG |
| | | UUCUACAAGUUCAUCAAGCCCAUCCUGGAGAAGAUGGACGGCACC |
| | | GAGGAGCUGCUGGUGAAGCUGAACCGGGAGGACCUGCUGCGGAA |
| | | GCAGCGGACCUUCGACAACGGCUCCAUCCCCCACCAGAUCCACCU |
| | | GGGCGAGCUGCACGCCAUCCUGCGGCGGCAGGAGGACUUCUACCC |
| | | CUUCCUGAAGGACAACCGGGAGAAGAUCGAGAAGAUCCUGACCU |
| | | UCCGGAUCCCCUACUACGUGGGCCCCCUGGCCCGGGGCAACUCCC |
| | | GGUUCGCCUGGAUGACCCGGAAGUCCGAGGAGACCAUCACCCCCU |
| | | GGAACUUCGAGGAGGUGGUGGACAAGGGCGCCUCCGCCCAGUCCU |
| | | UCAUCGAGCGGAUGACCAACUUCGACAAGAACCUGCCCAACGAGA |
| | | AGGUGCUGCCCAAGCACUCCCUGCUGUACGAGUACUUCACCGUGU |
| | | ACAACGAGCUGACCAAGGUGAAGUACGUGACCGAGGGCAUGCGG |
| | | AAGCCCGCCUUCCUGUCCGGCGAGCAGAAGAAGGCCAUCGUGGAC |
| | | CUGCUGUUCAAGACCAACCGGAAGGUGACCGUGAAGCAGCUGAA |
| | | GGAGGACUACUUCAAGAAGAUCGAGUGCUUCGACUCCGUGGAGA |
| | | UCUCCGGCGUGGAGGACCGGUUCAACGCCUCCCUGGGCACCUACC |
| | | ACGACCUGCUGAAGAUCAUCAAGGACAAGGACUUCCUGGACAAC |
| | | GAGGAGAACGAGGACAUCCUGGAGGACAUCGUGCUGACCCUGAC |
| | | CCUGUUCGAGGACCGGGAGAUGAUCGAGGAGCGGCUGAAGACCU |
| | | ACGCCCACCUGUUCGACGACAAGGUGAUGAAGCAGCUGAAGCGGC |
| | | GGCGGUACACCGGCUGGGGCCGGCUGUCCCGGAAGCUGAUCAACG |
| | | GCAUCCGGGACAAGCAGUCCGGCAAGACCAUCCUGGACUUCCUGA |
| | | AGUCCGACGGCUUCGCCAACCGGAACUUCAUGCAGCUGAUCCACG |
| | | ACGACUCCCUGACCUUCAAGGAGGACAUCCAGAAGGCCCAGGUGU |
| | | CCGGCCAGGGCGACUCCCUGCACGAGCACAUCGCCAACCUGGCCG |
| | | GCUCCCCCGCCAUCAAGAAGGGCAUCCUGCAGACCGUGAAGGUGG |
| | | UGGACGAGCUGGUGAAGGUGAUGGGCCGGCACAAGCCCGAGAAC |
| | | AUCGUGAUCGAGAUGGCCCGGGAGAACCAGACCACCCAGAAGGGC |
| | | CAGAAGAACUCCCGGGAGCGGAUGAAGCGGAUCGAGGAGGGCAU |
| | | CAAGGAGCUGGGCUCCCAGAUCCUGAAGGAGCACCCCGUGGAGAA |
| | | CACCCAGCUGCAGAACGAGAAGCUGUACCUGUACUACCUGCAGAA |
| | | CGGCCGGGACAUGUACGUGGACCAGGAGCUGGACAUCAACCGGCU |
| | | GUCCGACUACGACGUGGACCACAUCGUGCCCCAGUCCUUCCUGAA |
| | | GGACGACUCCAUCGACAACAAGGUGCUGACCCGGUCCGACAAGAA |
| | | CCGGGGCAAGUCCGACAACGUGCCCUCCGAGGAGGUGGUGAAGA |
| | | AGAUGAAGAACUACUGGCGGCAGCUGCUGAACGCCAAGCUGAUC |
| | | ACCCAGCGGAAGUUCGACAACCUGACCAAGGCCGAGCGGGGCGGC |
| | | CUGUCCGAGCUGGACAAGGCCGGCUUCAUCAAGCGGCAGCUGGUG |
| | | GAGACCCGGCAGAUCACCAAGCACGUGGCCCAGAUCCUGGACUCC |
| | | CGGAUGAACACCAAGUACGACGAGAACGACAAGCUGAUCCGGGA |
| | | GGUGAAGGUGAUCACCCUGAAGUCCAAGCUGGUGUCCGACUUCC |
| | | GGAAGGACUUCCAGUUCUACAAGGUGCGGGAGAUCAACAACUAC |
| | | CACCACGCCCACGACGCCUACCUGAACGCCGUGGUGGGCACCGCC |
| | | CUGAUCAAGAAGUACCCCAAGCUGGAGUCCGAGUUCGUGUACGG |
| | | CGACUACAAGGUGUACGACGUGCGGAAGAUGAUCGCCAAGUCCG |
| | | AGCAGGAGAUCGGCAAGGCCACCGCCAAGUACUUCUUCUACUCCA |
| | | ACAUCAUGAACUUCUUCAAGACCGAGAUCACCCUGGCCAACGGCG |
| | | AGAUCCGGAAGCGGCCCCUGAUCGAGACCAACGGCGAGACCGGCG |
| | | AGAUCGUGUGGGACAAGGGCCGGGACUUCGCCACCGUGCGGAAG |
| | | GUGCUGUCCAUGCCCCAGGUGAACAUCGUGAAGAAGACCGAGGU |
| | | GCAGACCGGCGGCUUCUCCAAGGAGUCCAUCCUGCCCAAGCGGAA |
| | | CUCCGACAAGCUGAUCGCCCGGAAGAAGGACUGGGACCCCAAGAA |
| | | GUACGGCGGCUUCGACUCCCCCACCGUGGCCUACUCCGUGCUGGU |
| | | GGUGGCCAAGGUGGAGAAGGGCAAGUCCAAGAAGCUGAAGUCCG |
| | | UGAAGGAGCUGCUGGGCAUCACCAUCAUGGAGCGGUCCUCCUUCG |
| | | AGAAGAACCCCAUCGACUUCCUGGAGGCCAAGGGCUACAAGGAG |
| | | GUGAAGAAGGACCUGAUCAUCAAGCUGCCCAAGUACUCCCUGUUC |
| | | GAGCUGGAGAACGGCCGGAAGCGGAUGCUGGCCUCCGCCGGCGAG |
| | | CUGCAGAAGGGCAACGAGCUGGCCCUGCCCUCCAAGUACGUGAAC |
| | | UUCCUGUACCUGGCCUCCCACUACGAGAAGCUGAAGGGCUCCCCC |
| | | GAGGACAACGAGCAGAAGCAGCUGUUCGUGGAGCAGCACAAGCA |
| | | CUACCUGGACGAGAUCAUCGAGCAGAUCUCCGAGUUCUCCAAGCG |
| | | GGUGAUCCUGGCCGACGCCAACCUGGACAAGGUGCUGUCCGCCUA |
| | | CAACAAGCACCGGGACAAGCCCAUCCGGGAGCAGGCCGAGAACAU |
| | | CAUCCACCUGUUCACCCUGACCAACCUGGGCGCCCCCGCCGCCUU |
| | | CAAGUACUUCGACACCACCAUCGACCGGAAGCGGUACACCUCCAC |
| | | CAAGGAGGUGCUGGACGCCACCCUGAUCCACCAGUCCAUCACCGG |
| | | CCUGUACGAGACCCGGAUCGACCUGUCCCAGCUGGGCGGCGACGG |
| | | CGGCGGCUCCCCCAAGAAGAAGCGGAAGGUGUCCGAGUCCGCCAC |
| | | CCCCGAGUCCGUGUCCGGCUGGCGGCUGUUCAAGAAGAUCUCCUG |
| | | ACUAGCACCAGCCUCAAGAACACCCGAAUGGAGUCUCUAAGCUAC |
| | | AUAAUACCAACUUACACUUUACAAAAUGUUGUCCCCCAAAAUGU |
| | | AGCCAUUCGUAUCUGCUCCUAAUAAAAAGAAAGUUUCUUCACAU |
| | | UCUCUCGAGAAAAAAAAAAAAUGGAAAAAAAAAAAACGGAAAAA |
| | | AAAAAAAGGUAAAAAAAAAAAAUAUAAAAAAAAAAAACAUAAAA |
| | | AAAAAAAACGAAAAAAAAAAAACGUAAAAAAAAAAAACUCAAAA |
| | | AAAAAAAAGAUAAAAAAAAAAAACCUAAAAAAAAAAAAUGUAAA |
| | | AAAAAAAAAGGGAAAAAAAAAAAACGCAAAAAAAAAAAACACAA |
| | | AAAAAAAAAAUGCAAAAAAAAAAAAUCGAAAAAAAAAAAAUCUA |
| | | AAAAAAAAAAACGAAAAAAAAAAAACCCAAAAAAAAAAAAGACA |
| | | AAAAAAAAAAAUAGAAAAAAAAAAAAGUUAAAAAAAAAAAACUG |
| | | AAAAAAAAAAAAUUUAAAAAAAAAAAAUCUAG |
| 5 | Open reading | AUGGAGGCCUCCCCCGCCUCCGGCCCCCGGCACCUGAUGGACCCC |
| | frame for BC22n | CACAUCUUCACCUCCAACUUCAACAACGGCAUCGGCCGGCACAAG |
| | with Hibit tag | ACCUACCUGUGCUACGAGGUGGAGCGGCUGGACAACGGCACCUCC |
| | | GUGAAGAUGGACCAGCACCGGGGCUUCCUGCACAACCAGGCCAAG |
| | | AACCUGCUGUGCGGCUUCUACGGCCGGCACGCCGAGCUGCGGUUC |
| | | CUGGACCUGGUGCCCUCCCUGCAGCUGGACCCCGCCCAGAUCUAC |
| | | CGGGUGACCUGGUUCAUCUCCUGGUCCCCCUGCUUCUCCUGGGGC |
| | | UGCGCCGGCGAGGUGCGGGCCUUCCUGCAGGAGAACACCCACGUG |
| | | CGGCUGCGGAUCUUCGCCGCCCGGAUCUACGACUACGACCCCCUG |
| | | UACAAGGAGGCCCUGCAGAUGCUGCGGGACGCCGGCGCCCAGGUG |
| | | UCCAUCAUGACCUACGACGAGUUCAAGCACUGCUGGGACACCUUC |
| | | GUGGACCACCAGGGCUGCCCCUUCCAGCCCUGGGACGGCCUGGAC |
| | | GAGCACUCCCAGGCCCUGUCCGGCCGGCUGCGGGCCAUCCUGCAG |
| | | AACCAGGGCAACUCCGGCUCCGAGACCCCCGGCACCUCCGAGUCC |
| | | GCCACCCCCGAGUCCGACAAGAAGUACUCCAUCGGCCUGGCCAUC |
| | | GGCACCAACUCCGUGGGCUGGGCCGUGAUCACCGACGAGUACAAG |
| | | GUGCCCUCCAAGAAGUUCAAGGUGCUGGGCAACACCGACCGGCAC |
| | | UCCAUCAAGAAGAACCUGAUCGGCGCCCUGCUGUUCGACUCCGGC |
| | | GAGACCGCCGAGGCCACCCGGCUGAAGCGGACCGCCCGGCGGCGG |
| | | UACACCCGGCGGAAGAACCGGAUCUGCUACCUGCAGGAGAUCUUC |
| | | UCCAACGAGAUGGCCAAGGUGGACGACUCCUUCUUCCACCGGCUG |
| | | GAGGAGUCCUUCCUGGUGGAGGAGGACAAGAAGCACGAGCGGCA |
| | | CCCCAUCUUCGGCAACAUCGUGGACGAGGUGGCCUACCACGAGAA |
| | | GUACCCCACCAUCUACCACCUGCGGAAGAAGCUGGUGGACUCCAC |
| | | CGACAAGGCCGACCUGCGGCUGAUCUACCUGGCCCUGGCCCACAU |
| | | GAUCAAGUUCCGGGGCCACUUCCUGAUCGAGGGCGACCUGAACCC |
| | | CGACAACUCCGACGUGGACAAGCUGUUCAUCCAGCUGGUGCAGAC |
| | | CUACAACCAGCUGUUCGAGGAGAACCCCAUCAACGCCUCCGGCGU |
| | | GGACGCCAAGGCCAUCCUGUCCGCCCGGCUGUCCAAGUCCCGGCG |
| | | GCUGGAGAACCUGAUCGCCCAGCUGCCCGGCGAGAAGAAGAACGG |
| | | CCUGUUCGGCAACCUGAUCGCCCUGUCCCUGGGCCUGACCCCCAA |
| | | CUUCAAGUCCAACUUCGACCUGGCCGAGGACGCCAAGCUGCAGCU |
| | | GUCCAAGGACACCUACGACGACGACCUGGACAACCUGCUGGCCCA |
| | | GAUCGGCGACCAGUACGCCGACCUGUUCCUGGCCGCCAAGAACCU |
| | | GUCCGACGCCAUCCUGCUGUCCGACAUCCUGCGGGUGAACACCGA |
| | | GAUCACCAAGGCCCCCCUGUCCGCCUCCAUGAUCAAGCGGUACGA |
| | | CGAGCACCACCAGGACCUGACCCUGCUGAAGGCCCUGGUGCGGCA |
| | | GCAGCUGCCCGAGAAGUACAAGGAGAUCUUCUUCGACCAGUCCAA |
| | | GAACGGCUACGCCGGCUACAUCGACGGCGGCGCCUCCCAGGAGGA |
| | | GUUCUACAAGUUCAUCAAGCCCAUCCUGGAGAAGAUGGACGGCA |
| | | CCGAGGAGCUGCUGGUGAAGCUGAACCGGGAGGACCUGCUGCGG |
| | | AAGCAGCGGACCUUCGACAACGGCUCCAUCCCCCACCAGAUCCAC |
| | | CUGGGCGAGCUGCACGCCAUCCUGCGGCGGCAGGAGGACUUCUAC |
| | | CCCUUCCUGAAGGACAACCGGGAGAAGAUCGAGAAGAUCCUGACC |
| | | UUCCGGAUCCCCUACUACGUGGGCCCCCUGGCCCGGGGCAACUCC |
| | | CGGUUCGCCUGGAUGACCCGGAAGUCCGAGGAGACCAUCACCCCC |
| | | UGGAACUUCGAGGAGGUGGUGGACAAGGGCGCCUCCGCCCAGUCC |
| | | UUCAUCGAGCGGAUGACCAACUUCGACAAGAACCUGCCCAACGAG |
| | | AAGGUGCUGCCCAAGCACUCCCUGCUGUACGAGUACUUCACCGUG |
| | | UACAACGAGCUGACCAAGGUGAAGUACGUGACCGAGGGCAUGCG |
| | | GAAGCCCGCCUUCCUGUCCGGCGAGCAGAAGAAGGCCAUCGUGGA |
| | | CCUGCUGUUCAAGACCAACCGGAAGGUGACCGUGAAGCAGCUGA |
| | | AGGAGGACUACUUCAAGAAGAUCGAGUGCUUCGACUCCGUGGAG |
| | | AUCUCCGGCGUGGAGGACCGGUUCAACGCCUCCCUGGGCACCUAC |
| | | CACGACCUGCUGAAGAUCAUCAAGGACAAGGACUUCCUGGACAAC |
| | | GAGGAGAACGAGGACAUCCUGGAGGACAUCGUGCUGACCCUGAC |
| | | CCUGUUCGAGGACCGGGAGAUGAUCGAGGAGCGGCUGAAGACCU |
| | | ACGCCCACCUGUUCGACGACAAGGUGAUGAAGCAGCUGAAGCGGC |
| | | GGCGGUACACCGGCUGGGGCCGGCUGUCCCGGAAGCUGAUCAACG |
| | | GCAUCCGGGACAAGCAGUCCGGCAAGACCAUCCUGGACUUCCUGA |
| | | AGUCCGACGGCUUCGCCAACCGGAACUUCAUGCAGCUGAUCCACG |
| | | ACGACUCCCUGACCUUCAAGGAGGACAUCCAGAAGGCCCAGGUGU |
| | | CCGGCCAGGGCGACUCCCUGCACGAGCACAUCGCCAACCUGGCCG |
| | | GCUCCCCCGCCAUCAAGAAGGGCAUCCUGCAGACCGUGAAGGUGG |
| | | UGGACGAGCUGGUGAAGGUGAUGGGCCGGCACAAGCCCGAGAAC |
| | | AUCGUGAUCGAGAUGGCCCGGGAGAACCAGACCACCCAGAAGGGC |
| | | CAGAAGAACUCCCGGGAGCGGAUGAAGCGGAUCGAGGAGGGCAU |
| | | CAAGGAGCUGGGCUCCCAGAUCCUGAAGGAGCACCCCGUGGAGAA |
| | | CACCCAGCUGCAGAACGAGAAGCUGUACCUGUACUACCUGCAGAA |
| | | CGGCCGGGACAUGUACGUGGACCAGGAGCUGGACAUCAACCGGCU |
| | | GUCCGACUACGACGUGGACCACAUCGUGCCCCAGUCCUUCCUGAA |
| | | GGACGACUCCAUCGACAACAAGGUGCUGACCCGGUCCGACAAGAA |
| | | CCGGGGCAAGUCCGACAACGUGCCCUCCGAGGAGGUGGUGAAGA |
| | | AGAUGAAGAACUACUGGCGGCAGCUGCUGAACGCCAAGCUGAUC |
| | | ACCCAGCGGAAGUUCGACAACCUGACCAAGGCCGAGCGGGGCGGC |
| | | CUGUCCGAGCUGGACAAGGCCGGCUUCAUCAAGCGGCAGCUGGUG |
| | | GAGACCCGGCAGAUCACCAAGCACGUGGCCCAGAUCCUGGACUCC |
| | | CGGAUGAACACCAAGUACGACGAGAACGACAAGCUGAUCCGGGA |
| | | GGUGAAGGUGAUCACCCUGAAGUCCAAGCUGGUGUCCGACUUCC |
| | | GGAAGGACUUCCAGUUCUACAAGGUGCGGGAGAUCAACAACUAC |
| | | CACCACGCCCACGACGCCUACCUGAACGCCGUGGUGGGCACCGCC |
| | | CUGAUCAAGAAGUACCCCAAGCUGGAGUCCGAGUUCGUGUACGG |
| | | CGACUACAAGGUGUACGACGUGCGGAAGAUGAUCGCCAAGUCCG |
| | | AGCAGGAGAUCGGCAAGGCCACCGCCAAGUACUUCUUCUACUCCA |
| | | ACAUCAUGAACUUCUUCAAGACCGAGAUCACCCUGGCCAACGGCG |
| | | AGAUCCGGAAGCGGCCCCUGAUCGAGACCAACGGCGAGACCGGCG |
| | | AGAUCGUGUGGGACAAGGGCCGGGACUUCGCCACCGUGCGGAAG |
| | | GUGCUGUCCAUGCCCCAGGUGAACAUCGUGAAGAAGACCGAGGU |
| | | GCAGACCGGCGGCUUCUCCAAGGAGUCCAUCCUGCCCAAGCGGAA |
| | | CUCCGACAAGCUGAUCGCCCGGAAGAAGGACUGGGACCCCAAGAA |
| | | GUACGGCGGCUUCGACUCCCCCACCGUGGCCUACUCCGUGCUGGU |
| | | GGUGGCCAAGGUGGAGAAGGGCAAGUCCAAGAAGCUGAAGUCCG |
| | | UGAAGGAGCUGCUGGGCAUCACCAUCAUGGAGCGGUCCUCCUUCG |
| | | AGAAGAACCCCAUCGACUUCCUGGAGGCCAAGGGCUACAAGGAG |
| | | GUGAAGAAGGACCUGAUCAUCAAGCUGCCCAAGUACUCCCUGUUC |
| | | GAGCUGGAGAACGGCCGGAAGCGGAUGCUGGCCUCCGCCGGCGAG |
| | | CUGCAGAAGGGCAACGAGCUGGCCCUGCCCUCCAAGUACGUGAAC |
| | | UUCCUGUACCUGGCCUCCCACUACGAGAAGCUGAAGGGCUCCCCC |
| | | GAGGACAACGAGCAGAAGCAGCUGUUCGUGGAGCAGCACAAGCA |
| | | CUACCUGGACGAGAUCAUCGAGCAGAUCUCCGAGUUCUCCAAGCG |
| | | GGUGAUCCUGGCCGACGCCAACCUGGACAAGGUGCUGUCCGCCUA |
| | | CAACAAGCACCGGGACAAGCCCAUCCGGGAGCAGGCCGAGAACAU |
| | | CAUCCACCUGUUCACCCUGACCAACCUGGGCGCCCCCGCCGCCUU |
| | | CAAGUACUUCGACACCACCAUCGACCGGAAGCGGUACACCUCCAC |
| | | CAAGGAGGUGCUGGACGCCACCCUGAUCCACCAGUCCAUCACCGG |
| | | CCUGUACGAGACCCGGAUCGACCUGUCCCAGCUGGGCGGCGACGG |
| | | CGGCGGCUCCCCCAAGAAGAAGCGGAAGGUGUCCGAGUCCGCCAC |
| | | CCCCGAGUCCGUGUCCGGCUGGCGGCUGUUCAAGAAGAUCUCCUG |
| | | A |
| 6 | Amino acid | MEASPASGPRHLMDPHIFTSNFNNGIGRHKTYLCYEVERLDNGTSVKM |
| | sequence for | DQHRGFLHNQAKNLLCGFYGRHAELRFLDLVPSLQLDPAQIYRVTWFI |
| | BC22n with Hibit | SWSPCFSWGCAGEVRAFLQENTHVRLRIFAARIYDYDPLYKEALQMLR |
| | tag | DAGAQVSIMTYDEFKHCWDTFVDHQGCPFQPWDGLDEHSQALSGRL |
| | | RAILQNQGNSGSETPGTSESATPESDKKYSIGLAIGTNSVGWAVITDEY |
| | | KVPSKKFKVLGNTDRHSIKKNLIGALLFDSGETAEATRLKRTARRRYT |
| | | RRKNRICYLQEIFSNEMAKVDDSFFHRLEESFLVEEDKKHERHPIFGNIV |
| | | DEVAYHEKYPTIYHLRKKLVDSTDKADLRLIYLALAHMIKFRGHFLIE |
| | | GDLNPDNSDVDKLFIQLVQTYNQLFEENPINASGVDAKAILSARLSKSR |
| | | RLENLIAQLPGEKKNGLFGNLIALSLGLTPNFKSNFDLAEDAKLQLSKD |
| | | TYDDDLDNLLAQIGDQYADLFLAAKNLSDAILLSDILRVNTEITKAPLS |
| | | ASMIKRYDEHHQDLTLLKALVRQQLPEKYKEIFFDQSKNGYAGYIDGG |
| | | ASQEEFYKFIKPILEKMDGTEELLVKLNREDLLRKQRTFDNGSIPHQIHL |
| | | GELHAILRRQEDFYPFLKDNREKIEKILTFRIPYYVGPLARGNSRFAWM |
| | | TRKSEETITPWNFEEVVDKGASAQSFIERMTNFDKNLPNEKVLPKHSLL |
| | | YEYFTVYNELTKVKYVTEGMRKPAFLSGEQKKAIVDLLFKTNRKVTV |
| | | KQLKEDYFKKIECFDSVEISGVEDRFNASLGTYHDLLKIIKDKDFLDNE |
| | | ENEDILEDIVLTLTLFEDREMIEERLKTYAHLFDDKVMKQLKRRRYTG |
| | | WGRLSRKLINGIRDKQSGKTILDFLKSDGFANRNFMQLIHDDSLTFKED |
| | | IQKAQVSGQGDSLHEHIANLAGSPAIKKGILQTVKVVDELVKVMGRHK |
| | | PENIVIEMARENQTTQKGQKNSRERMKRIEEGIKELGSQILKEHPVENT |
| | | QLQNEKLYLYYLQNGRDMYVDQELDINRLSDYDVDHIVPQSFLKDDSI |
| | | DNKVLTRSDKNRGKSDNVPSEEVVKKMKNYWRQLLNAKLITQRKFD |
| | | NLTKAERGGLSELDKAGFIKRQLVETRQITKHVAQILDSRMNTKYDEN |
| | | DKLIREVKVITLKSKLVSDFRKDFQFYKVREINNYHHAHDAYLNAVVG |
| | | TALIKKYPKLESEFVYGDYKVYDVRKMIAKSEQEIGKATAKYFFYSNI |
| | | MNFFKTEITLANGEIRKRPLIETNGETGEIVWDKGRDFATVRKVLSMPQ |
| | | VNIVKKTEVQTGGFSKESILPKRNSDKLIARKKDWDPKKYGGFDSPTV |
| | | AYSVLVVAKVEKGKSKKLKSVKELLGITIMERSSFEKNPIDFLEAKGYK |
| | | EVKKDLIIKLPKYSLFELENGRKRMLASAGELQKGNELALPSKYVNFL |
| | | YLASHYEKLKGSPEDNEQKQLFVEQHKHYLDEIIEQISEFSKRVILADA |
| | | NLDKVLSAYNKHRDKPIREQAENIIHLFTLTNLGAPAAFKYFDTTIDRK |
| | | RYTSTKEVLDATLIHQSITGLYETRIDLSQLGGDGGGSPKKKRKVSESA |
| | | TPESVSGWRLFKKIS |
| 7 | mRNA encoding | GGGAGACCCAAGCUGGCUAGCGUUUAAACUUAAGCUUUCCCGCA |
| | BE3 | GUCGGCGUCCAGCGGCUCUGCUUGUUCGUGUGUGUGUCGUUGCA |
| | | GGCCUUAUUCGGAUCCGCCACCAUGAGCAGCGAAACAGGACCGGU |
| | | CGCAGUCGACCCGACACUGAGAAGAAGAAUCGAACCGCACGAAUU |
| | | CGAAGUCUUCUUCGACCCGAGAGAACUGAGAAAGGAAACAUGCC |
| | | UGCUGUACGAAAUCAACUGGGGAGGAAGACACAGCAUCUGGAGA |
| | | CACACAAGCCAGAACACAAACAAGCACGUCGAAGUCAACUUCAUC |
| | | GAAAAGUUCACAACAGAAAGAUACUUCUGCCCGAACACAAGAUG |
| | | CAGCAUCACAUGGUUCCUGAGCUGGAGCCCGUGCGGAGAAUGCA |
| | | GCAGAGCAAUCACAGAAUUCCUGAGCAGAUACCCGCACGUCACAC |
| | | UGUUCAUCUACAUCGCAAGACUGUACCACCACGCAGACCCGAGAA |
| | | ACAGACAGGGACUGAGAGACCUGAUCAGCAGCGGAGUCACAAUC |
| | | CAGAUCAUGACAGAACAGGAAAGCGGAUACUGCUGGAGAAACUU |
| | | CGUCAACUACAGCCCGAGCAACGAAGCACACUGGCCGAGAUACCC |
| | | GCACCUGUGGGUCAGACUGUACGUCCUGGAACUGUACUGCAUCA |
| | | UCCUGGGACUGCCGCCGUGCCUGAACAUCCUGAGAAGAAAGCAGC |
| | | CGCAGCUGACAUUCUUCACAAUCGCACUGCAGAGCUGCCACUACC |
| | | AGAGACUGCCGCCGCACAUCCUGUGGGCAACAGGACUGAAGAGCG |
| | | GAAGCGAAACACCGGGAACAAGCGAAAGCGCAACACCGGAAAGC |
| | | GACAAGAAGUACAGCAUCGGACUGGCCAUCGGAACAAACAGCGU |
| | | CGGAUGGGCAGUCAUCACAGACGAAUACAAGGUCCCGAGCAAGA |
| | | AGUUCAAGGUCCUGGGAAACACAGACAGACACAGCAUCAAGAAG |
| | | AACCUGAUCGGAGCACUGCUGUUCGACAGCGGAGAAACAGCAGA |
| | | AGCAACAAGACUGAAGAGAACAGCAAGAAGAAGAUACACAAGAA |
| | | GAAAGAACAGAAUCUGCUACCUGCAGGAAAUCUUCAGCAACGAA |
| | | AUGGCAAAGGUCGACGACAGCUUCUUCCACAGACUGGAAGAAAG |
| | | CUUCCUGGUCGAAGAAGACAAGAAGCACGAAAGACACCCGAUCU |
| | | UCGGAAACAUCGUCGACGAAGUCGCAUACCACGAAAAGUACCCGA |
| | | CAAUCUACCACCUGAGAAAGAAGCUGGUCGACAGCACAGACAAG |
| | | GCAGACCUGAGACUGAUCUACCUGGCACUGGCACACAUGAUCAAG |
| | | UUCAGAGGACACUUCCUGAUCGAAGGAGACCUGAACCCGGACAAC |
| | | AGCGACGUCGACAAGCUGUUCAUCCAGCUGGUCCAGACAUACAAC |
| | | CAGCUGUUCGAAGAAAACCCGAUCAACGCAAGCGGAGUCGACGCA |
| | | AAGGCAAUCCUGAGCGCAAGACUGAGCAAGAGCAGAAGACUGGA |
| | | AAACCUGAUCGCACAGCUGCCGGGAGAAAAGAAGAACGGACUGU |
| | | UCGGAAACCUGAUCGCACUGAGCCUGGGACUGACACCGAACUUCA |
| | | AGAGCAACUUCGACCUGGCAGAAGACGCAAAGCUGCAGCUGAGC |
| | | AAGGACACAUACGACGACGACCUGGACAACCUGCUGGCACAGAUC |
| | | GGAGACCAGUACGCAGACCUGUUCCUGGCAGCAAAGAACCUGAGC |
| | | GACGCAAUCCUGCUGAGCGACAUCCUGAGAGUCAACACAGAAAUC |
| | | ACAAAGGCACCGCUGAGCGCAAGCAUGAUCAAGAGAUACGACGA |
| | | ACACCACCAGGACCUGACACUGCUGAAGGCACUGGUCAGACAGCA |
| | | GCUGCCGGAAAAGUACAAGGAAAUCUUCUUCGACCAGAGCAAGA |
| | | ACGGAUACGCAGGAUACAUCGACGGAGGAGCAAGCCAGGAAGAA |
| | | UUCUACAAGUUCAUCAAGCCGAUCCUGGAAAAGAUGGACGGAAC |
| | | AGAAGAACUGCUGGUCAAGCUGAACAGAGAAGACCUGCUGAGAA |
| | | AGCAGAGAACAUUCGACAACGGAAGCAUCCCGCACCAGAUCCACC |
| | | UGGGAGAACUGCACGCAAUCCUGAGAAGACAGGAAGACUUCUAC |
| | | CCGUUCCUGAAGGACAACAGAGAAAAGAUCGAAAAGAUCCUGAC |
| | | AUUCAGAAUCCCGUACUACGUCGGACCGCUGGCAAGAGGAAACA |
| | | GCAGAUUCGCAUGGAUGACAAGAAAGAGCGAAGAAACAAUCACA |
| | | CCGUGGAACUUCGAAGAAGUCGUCGACAAGGGAGCAAGCGCACA |
| | | GAGCUUCAUCGAAAGAAUGACAAACUUCGACAAGAACCUGCCGA |
| | | ACGAAAAGGUCCUGCCGAAGCACAGCCUGCUGUACGAAUACUUCA |
| | | CAGUCUACAACGAACUGACAAAGGUCAAGUACGUCACAGAAGGA |
| | | AUGAGAAAGCCGGCAUUCCUGAGCGGAGAACAGAAGAAGGCAAU |
| | | CGUCGACCUGCUGUUCAAGACAAACAGAAAGGUCACAGUCAAGC |
| | | AGCUGAAGGAAGACUACUUCAAGAAGAUCGAAUGCUUCGACAGC |
| | | GUCGAAAUCAGCGGAGUCGAAGACAGAUUCAACGCAAGCCUGGG |
| | | AACAUACCACGACCUGCUGAAGAUCAUCAAGGACAAGGACUUCCU |
| | | GGACAACGAAGAAAACGAAGACAUCCUGGAAGACAUCGUCCUGA |
| | | CACUGACACUGUUCGAAGACAGAGAAAUGAUCGAAGAAAGACUG |
| | | AAGACAUACGCACACCUGUUCGACGACAAGGUCAUGAAGCAGCU |
| | | GAAGAGAAGAAGAUACACAGGAUGGGGAAGACUGAGCAGAAAGC |
| | | UGAUCAACGGAAUCAGAGACAAGCAGAGCGGAAAGACAAUCCUG |
| | | GACUUCCUGAAGAGCGACGGAUUCGCAAACAGAAACUUCAUGCA |
| | | GCUGAUCCACGACGACAGCCUGACAUUCAAGGAAGACAUCCAGAA |
| | | GGCACAGGUCAGCGGACAGGGAGACAGCCUGCACGAACACAUCGC |
| | | AAACCUGGCAGGAAGCCCGGCAAUCAAGAAGGGAAUCCUGCAGA |
| | | CAGUCAAGGUCGUCGACGAACUGGUCAAGGUCAUGGGAAGACAC |
| | | AAGCCGGAAAACAUCGUCAUCGAAAUGGCAAGAGAAAACCAGAC |
| | | AACACAGAAGGGACAGAAGAACAGCAGAGAAAGAAUGAAGAGAA |
| | | UCGAAGAAGGAAUCAAGGAACUGGGAAGCCAGAUCCUGAAGGAA |
| | | CACCCGGUCGAAAACACACAGCUGCAGAACGAAAAGCUGUACCUG |
| | | UACUACCUGCAGAACGGAAGAGACAUGUACGUCGACCAGGAACU |
| | | GGACAUCAACAGACUGAGCGACUACGACGUCGACCACAUCGUCCC |
| | | GCAGAGCUUCCUGAAGGACGACAGCAUCGACAACAAGGUCCUGAC |
| | | AAGAAGCGACAAGAACAGAGGAAAGAGCGACAACGUCCCGAGCG |
| | | AAGAAGUCGUCAAGAAGAUGAAGAACUACUGGAGACAGCUGCUG |
| | | AACGCAAAGCUGAUCACACAGAGAAAGUUCGACAACCUGACAAA |
| | | GGCAGAGAGAGGAGGACUGAGCGAACUGGACAAGGCAGGAUUCA |
| | | UCAAGAGACAGCUGGUCGAAACAAGACAGAUCACAAAGCACGUC |
| | | GCACAGAUCCUGGACAGCAGAAUGAACACAAAGUACGACGAAAA |
| | | CGACAAGCUGAUCAGAGAAGUCAAGGUCAUCACACUGAAGAGCA |
| | | AGCUGGUCAGCGACUUCAGAAAGGACUUCCAGUUCUACAAGGUC |
| | | AGAGAAAUCAACAACUACCACCACGCACACGACGCAUACCUGAAC |
| | | GCAGUCGUCGGAACAGCACUGAUCAAGAAGUACCCGAAGCUGGA |
| | | AAGCGAAUUCGUCUACGGAGACUACAAGGUCUACGACGUCAGAA |
| | | AGAUGAUCGCAAAGAGCGAACAGGAAAUCGGAAAGGCAACAGCA |
| | | AAGUACUUCUUCUACAGCAACAUCAUGAACUUCUUCAAGACAGA |
| | | AAUCACACUGGCAAACGGAGAAAUCAGAAAGAGACCGCUGAUCG |
| | | AAACAAACGGAGAAACAGGAGAAAUCGUCUGGGACAAGGGAAGA |
| | | GACUUCGCAACAGUCAGAAAGGUCCUGAGCAUGCCGCAGGUCAAC |
| | | AUCGUCAAGAAGACAGAAGUCCAGACAGGAGGAUUCAGCAAGGA |
| | | AAGCAUCCUGCCGAAGAGAAACAGCGACAAGCUGAUCGCAAGAA |
| | | AGAAGGACUGGGACCCGAAGAAGUACGGAGGAUUCGACAGCCCG |
| | | ACAGUCGCAUACAGCGUCCUGGUCGUCGCAAAGGUCGAAAAGGG |
| | | AAAGAGCAAGAAGCUGAAGAGCGUCAAGGAACUGCUGGGAAUCA |
| | | CAAUCAUGGAAAGAAGCAGCUUCGAAAAGAACCCGAUCGACUUC |
| | | CUGGAAGCAAAGGGAUACAAGGAAGUCAAGAAGGACCUGAUCAU |
| | | CAAGCUGCCGAAGUACAGCCUGUUCGAACUGGAAAACGGAAGAA |
| | | AGAGAAUGCUGGCAAGCGCAGGAGAACUGCAGAAGGGAAACGAA |
| | | CUGGCACUGCCGAGCAAGUACGUCAACUUCCUGUACCUGGCAAGC |
| | | CACUACGAAAAGCUGAAGGGAAGCCCGGAAGACAACGAACAGAA |
| | | GCAGCUGUUCGUCGAACAGCACAAGCACUACCUGGACGAAAUCAU |
| | | CGAACAGAUCAGCGAAUUCAGCAAGAGAGUCAUCCUGGCAGACG |
| | | CAAACCUGGACAAGGUCCUGAGCGCAUACAACAAGCACAGAGACA |
| | | AGCCGAUCAGAGAACAGGCAGAAAACAUCAUCCACCUGUUCACAC |
| | | UGACAAACCUGGGAGCACCGGCAGCAUUCAAGUACUUCGACACAA |
| | | CAAUCGACAGAAAGAGAUACACAAGCACAAAGGAAGUCCUGGAC |
| | | GCAACACUGAUCCACCAGAGCAUCACAGGACUGUACGAAACAAGA |
| | | AUCGAUCUGAGCCAGCUGGGAGGAGACAGCGGAGGAAGCACAAA |
| | | CCUGAGCGACAUCAUCGAAAAGGAAACAGGAAAGCAGCUGGUCA |
| | | UCCAGGAAAGCAUCCUGAUGCUGCCGGAAGAAGUCGAAGAAGUC |
| | | AUCGGAAACAAGCCGGAAAGCGACAUCCUGGUCCACACAGCAUAC |
| | | GACGAAAGCACAGACGAAAACGUCAUGCUGCUGACAAGCGACGC |
| | | ACCGGAAUACAAGCCGUGGGCACUGGUCAUCCAGGACAGCAACGG |
| | | AGAAAACAAGAUCAAGAUGCUGAGCGGAGGAAGCCCGAAGAAGA |
| | | AGAGAAAGGUCUAAUAGUCUAGACAUCACAUUUAAAAGCAUCUC |
| | | AGCCUACCAUGAGAAUAAGAGAAAGAAAAUGAAGAUCAAUAGCU |
| | | UAUUCAUCUCUUUUUCUUUUUCGUUGGUGUAAAGCCAACACCCU |
| | | GUCUAAAAAACAUAAAUUUCUUUAAUCAUUUUGCCUCUUUUCUC |
| | | UGUGCUUCAAUUAAUAAAAAAUGGAAAGAACCUCGAGAAAAAAA |
| | | AAAAAAAAAAAAAAAAAAAAAAAGCGAAAAAAAAAAAAAAAAAA |
| | | AAAAAAAAAAAACCGAAAAAAAAAAAAAAAAAAAAAAAAAAAAA |
| | | AAAAAAAAAAU |
| 8 | Open reading | AUGAGCAGCGAAACAGGACCGGUCGCAGUCGACCCGACACUGAGA |
| | frame for BE3 | AGAAGAAUCGAACCGCACGAAUUCGAAGUCUUCUUCGACCCGAG |
| | | AGAACUGAGAAAGGAAACAUGCCUGCUGUACGAAAUCAACUGGG |
| | | GAGGAAGACACAGCAUCUGGAGACACACAAGCCAGAACACAAAC |
| | | AAGCACGUCGAAGUCAACUUCAUCGAAAAGUUCACAACAGAAAG |
| | | AUACUUCUGCCCGAACACAAGAUGCAGCAUCACAUGGUUCCUGAG |
| | | CUGGAGCCCGUGCGGAGAAUGCAGCAGAGCAAUCACAGAAUUCC |
| | | UGAGCAGAUACCCGCACGUCACACUGUUCAUCUACAUCGCAAGAC |
| | | UGUACCACCACGCAGACCCGAGAAACAGACAGGGACUGAGAGACC |
| | | UGAUCAGCAGCGGAGUCACAAUCCAGAUCAUGACAGAACAGGAA |
| | | AGCGGAUACUGCUGGAGAAACUUCGUCAACUACAGCCCGAGCAAC |
| | | GAAGCACACUGGCCGAGAUACCCGCACCUGUGGGUCAGACUGUAC |
| | | GUCCUGGAACUGUACUGCAUCAUCCUGGGACUGCCGCCGUGCCUG |
| | | AACAUCCUGAGAAGAAAGCAGCCGCAGCUGACAUUCUUCACAAUC |
| | | GCACUGCAGAGCUGCCACUACCAGAGACUGCCGCCGCACAUCCUG |
| | | UGGGCAACAGGACUGAAGAGCGGAAGCGAAACACCGGGAACAAG |
| | | CGAAAGCGCAACACCGGAAAGCGACAAGAAGUACAGCAUCGGAC |
| | | UGGCCAUCGGAACAAACAGCGUCGGAUGGGCAGUCAUCACAGAC |
| | | GAAUACAAGGUCCCGAGCAAGAAGUUCAAGGUCCUGGGAAACAC |
| | | AGACAGACACAGCAUCAAGAAGAACCUGAUCGGAGCACUGCUGU |
| | | UCGACAGCGGAGAAACAGCAGAAGCAACAAGACUGAAGAGAACA |
| | | GCAAGAAGAAGAUACACAAGAAGAAAGAACAGAAUCUGCUACCU |
| | | GCAGGAAAUCUUCAGCAACGAAAUGGCAAAGGUCGACGACAGCU |
| | | UCUUCCACAGACUGGAAGAAAGCUUCCUGGUCGAAGAAGACAAG |
| | | AAGCACGAAAGACACCCGAUCUUCGGAAACAUCGUCGACGAAGUC |
| | | GCAUACCACGAAAAGUACCCGACAAUCUACCACCUGAGAAAGAAG |
| | | CUGGUCGACAGCACAGACAAGGCAGACCUGAGACUGAUCUACCUG |
| | | GCACUGGCACACAUGAUCAAGUUCAGAGGACACUUCCUGAUCGA |
| | | AGGAGACCUGAACCCGGACAACAGCGACGUCGACAAGCUGUUCAU |
| | | CCAGCUGGUCCAGACAUACAACCAGCUGUUCGAAGAAAACCCGAU |
| | | CAACGCAAGCGGAGUCGACGCAAAGGCAAUCCUGAGCGCAAGACU |
| | | GAGCAAGAGCAGAAGACUGGAAAACCUGAUCGCACAGCUGCCGG |
| | | GAGAAAAGAAGAACGGACUGUUCGGAAACCUGAUCGCACUGAGC |
| | | CUGGGACUGACACCGAACUUCAAGAGCAACUUCGACCUGGCAGAA |
| | | GACGCAAAGCUGCAGCUGAGCAAGGACACAUACGACGACGACCUG |
| | | GACAACCUGCUGGCACAGAUCGGAGACCAGUACGCAGACCUGUUC |
| | | CUGGCAGCAAAGAACCUGAGCGACGCAAUCCUGCUGAGCGACAUC |
| | | CUGAGAGUCAACACAGAAAUCACAAAGGCACCGCUGAGCGCAAGC |
| | | AUGAUCAAGAGAUACGACGAACACCACCAGGACCUGACACUGCUG |
| | | AAGGCACUGGUCAGACAGCAGCUGCCGGAAAAGUACAAGGAAAU |
| | | CUUCUUCGACCAGAGCAAGAACGGAUACGCAGGAUACAUCGACG |
| | | GAGGAGCAAGCCAGGAAGAAUUCUACAAGUUCAUCAAGCCGAUC |
| | | CUGGAAAAGAUGGACGGAACAGAAGAACUGCUGGUCAAGCUGAA |
| | | CAGAGAAGACCUGCUGAGAAAGCAGAGAACAUUCGACAACGGAA |
| | | GCAUCCCGCACCAGAUCCACCUGGGAGAACUGCACGCAAUCCUGA |
| | | GAAGACAGGAAGACUUCUACCCGUUCCUGAAGGACAACAGAGAA |
| | | AAGAUCGAAAAGAUCCUGACAUUCAGAAUCCCGUACUACGUCGG |
| | | ACCGCUGGCAAGAGGAAACAGCAGAUUCGCAUGGAUGACAAGAA |
| | | AGAGCGAAGAAACAAUCACACCGUGGAACUUCGAAGAAGUCGUC |
| | | GACAAGGGAGCAAGCGCACAGAGCUUCAUCGAAAGAAUGACAAA |
| | | CUUCGACAAGAACCUGCCGAACGAAAAGGUCCUGCCGAAGCACAG |
| | | CCUGCUGUACGAAUACUUCACAGUCUACAACGAACUGACAAAGG |
| | | UCAAGUACGUCACAGAAGGAAUGAGAAAGCCGGCAUUCCUGAGC |
| | | GGAGAACAGAAGAAGGCAAUCGUCGACCUGCUGUUCAAGACAAA |
| | | CAGAAAGGUCACAGUCAAGCAGCUGAAGGAAGACUACUUCAAGA |
| | | AGAUCGAAUGCUUCGACAGCGUCGAAAUCAGCGGAGUCGAAGAC |
| | | AGAUUCAACGCAAGCCUGGGAACAUACCACGACCUGCUGAAGAUC |
| | | AUCAAGGACAAGGACUUCCUGGACAACGAAGAAAACGAAGACAU |
| | | CCUGGAAGACAUCGUCCUGACACUGACACUGUUCGAAGACAGAG |
| | | AAAUGAUCGAAGAAAGACUGAAGACAUACGCACACCUGUUCGAC |
| | | GACAAGGUCAUGAAGCAGCUGAAGAGAAGAAGAUACACAGGAUG |
| | | GGGAAGACUGAGCAGAAAGCUGAUCAACGGAAUCAGAGACAAGC |
| | | AGAGCGGAAAGACAAUCCUGGACUUCCUGAAGAGCGACGGAUUC |
| | | GCAAACAGAAACUUCAUGCAGCUGAUCCACGACGACAGCCUGACA |
| | | UUCAAGGAAGACAUCCAGAAGGCACAGGUCAGCGGACAGGGAGA |
| | | CAGCCUGCACGAACACAUCGCAAACCUGGCAGGAAGCCCGGCAAU |
| | | CAAGAAGGGAAUCCUGCAGACAGUCAAGGUCGUCGACGAACUGG |
| | | UCAAGGUCAUGGGAAGACACAAGCCGGAAAACAUCGUCAUCGAA |
| | | AUGGCAAGAGAAAACCAGACAACACAGAAGGGACAGAAGAACAG |
| | | CAGAGAAAGAAUGAAGAGAAUCGAAGAAGGAAUCAAGGAACUGG |
| | | GAAGCCAGAUCCUGAAGGAACACCCGGUCGAAAACACACAGCUGC |
| | | AGAACGAAAAGCUGUACCUGUACUACCUGCAGAACGGAAGAGAC |
| | | AUGUACGUCGACCAGGAACUGGACAUCAACAGACUGAGCGACUA |
| | | CGACGUCGACCACAUCGUCCCGCAGAGCUUCCUGAAGGACGACAG |
| | | CAUCGACAACAAGGUCCUGACAAGAAGCGACAAGAACAGAGGAA |
| | | AGAGCGACAACGUCCCGAGCGAAGAAGUCGUCAAGAAGAUGAAG |
| | | AACUACUGGAGACAGCUGCUGAACGCAAAGCUGAUCACACAGAG |
| | | AAAGUUCGACAACCUGACAAAGGCAGAGAGAGGAGGACUGAGCG |
| | | AACUGGACAAGGCAGGAUUCAUCAAGAGACAGCUGGUCGAAACA |
| | | AGACAGAUCACAAAGCACGUCGCACAGAUCCUGGACAGCAGAAU |
| | | GAACACAAAGUACGACGAAAACGACAAGCUGAUCAGAGAAGUCA |
| | | AGGUCAUCACACUGAAGAGCAAGCUGGUCAGCGACUUCAGAAAG |
| | | GACUUCCAGUUCUACAAGGUCAGAGAAAUCAACAACUACCACCAC |
| | | GCACACGACGCAUACCUGAACGCAGUCGUCGGAACAGCACUGAUC |
| | | AAGAAGUACCCGAAGCUGGAAAGCGAAUUCGUCUACGGAGACUA |
| | | CAAGGUCUACGACGUCAGAAAGAUGAUCGCAAAGAGCGAACAGG |
| | | AAAUCGGAAAGGCAACAGCAAAGUACUUCUUCUACAGCAACAUC |
| | | AUGAACUUCUUCAAGACAGAAAUCACACUGGCAAACGGAGAAAU |
| | | CAGAAAGAGACCGCUGAUCGAAACAAACGGAGAAACAGGAGAAA |
| | | UCGUCUGGGACAAGGGAAGAGACUUCGCAACAGUCAGAAAGGUC |
| | | CUGAGCAUGCCGCAGGUCAACAUCGUCAAGAAGACAGAAGUCCA |
| | | GACAGGAGGAUUCAGCAAGGAAAGCAUCCUGCCGAAGAGAAACA |
| | | GCGACAAGCUGAUCGCAAGAAAGAAGGACUGGGACCCGAAGAAG |
| | | UACGGAGGAUUCGACAGCCCGACAGUCGCAUACAGCGUCCUGGUC |
| | | GUCGCAAAGGUCGAAAAGGGAAAGAGCAAGAAGCUGAAGAGCGU |
| | | CAAGGAACUGCUGGGAAUCACAAUCAUGGAAAGAAGCAGCUUCG |
| | | AAAAGAACCCGAUCGACUUCCUGGAAGCAAAGGGAUACAAGGAA |
| | | GUCAAGAAGGACCUGAUCAUCAAGCUGCCGAAGUACAGCCUGUU |
| | | CGAACUGGAAAACGGAAGAAAGAGAAUGCUGGCAAGCGCAGGAG |
| | | AACUGCAGAAGGGAAACGAACUGGCACUGCCGAGCAAGUACGUC |
| | | AACUUCCUGUACCUGGCAAGCCACUACGAAAAGCUGAAGGGAAG |
| | | CCCGGAAGACAACGAACAGAAGCAGCUGUUCGUCGAACAGCACAA |
| | | GCACUACCUGGACGAAAUCAUCGAACAGAUCAGCGAAUUCAGCA |
| | | AGAGAGUCAUCCUGGCAGACGCAAACCUGGACAAGGUCCUGAGC |
| | | GCAUACAACAAGCACAGAGACAAGCCGAUCAGAGAACAGGCAGA |
| | | AAACAUCAUCCACCUGUUCACACUGACAAACCUGGGAGCACCGGC |
| | | AGCAUUCAAGUACUUCGACACAACAAUCGACAGAAAGAGAUACA |
| | | CAAGCACAAAGGAAGUCCUGGACGCAACACUGAUCCACCAGAGCA |
| | | UCACAGGACUGUACGAAACAAGAAUCGAUCUGAGCCAGCUGGGA |
| | | GGAGACAGCGGAGGAAGCACAAACCUGAGCGACAUCAUCGAAAA |
| | | GGAAACAGGAAAGCAGCUGGUCAUCCAGGAAAGCAUCCUGAUGC |
| | | UGCCGGAAGAAGUCGAAGAAGUCAUCGGAAACAAGCCGGAAAGC |
| | | GACAUCCUGGUCCACACAGCAUACGACGAAAGCACAGACGAAAAC |
| | | GUCAUGCUGCUGACAAGCGACGCACCGGAAUACAAGCCGUGGGCA |
| | | CUGGUCAUCCAGGACAGCAACGGAGAAAACAAGAUCAAGAUGCU |
| | | GAGCGGAGGAAGCCCGAAGAAGAAGAGAAAGGUC |
| 9 | Amino acid | MSSETGPVAVDPTLRRRIEPHEFEVFFDPRELRKETCLLYEINWGGRHSI |
| | sequence for BE3 | WRHTSQNTNKHVEVNFIEKFTTERYFCPNTRCSITWFLSWSPCGECSRA |
| | | ITEFLSRYPHVTLFIYIARLYHHADPRNRQGLRDLISSGVTIQIMTEQESG |
| | | YCWRNFVNYSPSNEAHWPRYPHLWVRLYVLELYCIILGLPPCLNILRR |
| | | KQPQLTFFTIALQSCHYQRLPPHILWATGLKSGSETPGTSESATPESDKK |
| | | YSIGLAIGTNSVGWAVITDEYKVPSKKFKVLGNTDRHSIKKNLIGALLF |
| | | DSGETAEATRLKRTARRRYTRRKNRICYLQEIFSNEMAKVDDSFFHRL |
| | | EESFLVEEDKKHERHPIFGNIVDEVAYHEKYPTIYHLRKKLVDSTDKAD |
| | | LRLIYLALAHMIKFRGHFLIEGDLNPDNSDVDKLFIQLVQTYNQLFEEN |
| | | PINASGVDAKAILSARLSKSRRLENLIAQLPGEKKNGLFGNLIALSLGLT |
| | | PNFKSNFDLAEDAKLQLSKDTYDDDLDNLLAQIGDQYADLFLAAKNL |
| | | SDAILLSDILRVNTEITKAPLSASMIKRYDEHHQDLTLLKALVRQQLPE |
| | | KYKEIFFDQSKNGYAGYIDGGASQEEFYKFIKPILEKMDGTEELLVKLN |
| | | REDLLRKQRTFDNGSIPHQIHLGELHAILRRQEDFYPFLKDNREKIEKIL |
| | | TFRIPYYVGPLARGNSRFAWMTRKSEETITPWNFEEVVDKGASAQSFIE |
| | | RMTNFDKNLPNEKVLPKHSLLYEYFTVYNELTKVKYVTEGMRKPAFL |
| | | SGEQKKAIVDLLFKTNRKVTVKQLKEDYFKKIECFDSVEISGVEDRFNA |
| | | SLGTYHDLLKIIKDKDFLDNEENEDILEDIVLTLTLFEDREMIEERLKTY |
| | | AHLFDDKVMKQLKRRRYTGWGRLSRKLINGIRDKQSGKTILDFLKSD |
| | | GFANRNFMQLIHDDSLTFKEDIQKAQVSGQGDSLHEHIANLAGSPAIK |
| | | KGILQTVKVVDELVKVMGRHKPENIVIEMARENQTTQKGQKNSRERM |
| | | KRIEEGIKELGSQILKEHPVENTQLQNEKLYLYYLQNGRDMYVDQELD |
| | | INRLSDYDVDHIVPQSFLKDDSIDNKVLTRSDKNRGKSDNVPSEEVVK |
| | | KMKNYWRQLLNAKLITQRKFDNLTKAERGGLSELDKAGFIKRQLVET |
| | | RQITKHVAQILDSRMNTKYDENDKLIREVKVITLKSKLVSDFRKDFQFY |
| | | KVREINNYHHAHDAYLNAVVGTALIKKYPKLESEFVYGDYKVYDVRK |
| | | MIAKSEQEIGKATAKYFFYSNIMNFFKTEITLANGEIRKRPLIETNGETG |
| | | EIVWDKGRDFATVRKVLSMPQVNIVKKTEVQTGGFSKESILPKRNSDK |
| | | LIARKKDWDPKKYGGFDSPTVAYSVLVVAKVEKGKSKKLKSVKELLG |
| | | ITIMERSSFEKNPIDFLEAKGYKEVKKDLIIKLPKYSLFELENGRKRMLA |
| | | SAGELQKGNELALPSKYVNFLYLASHYEKLKGSPEDNEQKQLFVEQH |
| | | KHYLDEIIEQISEFSKRVILADANLDKVLSAYNKHRDKPIREQAENIIHL |
| | | FTLTNLGAPAAFKYFDTTIDRKRYTSTKEVLDATLIHQSITGLYETRIDL |
| | | SQLGGDSGGSTNLSDIIEKETGKQLVIQESILMLPEEVEEVIGNKPESDIL |
| | | VHTAYDESTDENVMLLTSDAPEYKPWALVIQDSNGENKIKMLSGGSP |
| | | KKKRKV |
| 10 | mRNA encoding | GGGUCCCGCAGUCGGCGUCCAGCGGCUCUGCUUGUUCGUGUGUGU |
| | BE3 | GUCGUUGCAGGCCUUAUUCGGAUCCACCAUGAGCUCAGAGACUG |
| | | GCCCAGUGGCUGUGGACCCCACAUUGAGACGGCGGAUCGAGCCCC |
| | | AUGAGUUUGAGGUAUUCUUCGAUCCGAGAGAGCUCCGCAAGGAG |
| | | ACCUGCCUGCUUUACGAAAUUAAUUGGGGGGGCCGGCACUCCAU |
| | | UUGGCGACAUACAUCACAGAACACUAACAAGCACGUCGAAGUCA |
| | | ACUUCAUCGAGAAGUUCACGACAGAAAGAUAUUUCUGUCCGAAC |
| | | ACAAGGUGCAGCAUUACCUGGUUUCUCAGCUGGAGCCCAUGCGGC |
| | | GAAUGUAGUAGGGCCAUCACUGAAUUCCUGUCAAGGUAUCCCCA |
| | | CGUCACUCUGUUUAUUUACAUCGCAAGGCUGUACCACCACGCUGA |
| | | CCCCCGCAAUCGACAAGGCCUGCGGGAUUUGAUCUCUUCAGGUGU |
| | | GACUAUCCAAAUUAUGACUGAGCAGGAGUCAGGAUACUGCUGGA |
| | | GAAACUUUGUGAAUUAUAGCCCGAGUAAUGAAGCCCACUGGCCU |
| | | AGGUAUCCCCAUCUGUGGGUACGACUGUACGUUCUUGAACUGUA |
| | | CUGCAUCAUACUGGGCCUGCCUCCUUGUCUCAACAUUCUGAGAAG |
| | | GAAGCAGCCACAGCUGACAUUCUUUACCAUCGCUCUUCAGUCUUG |
| | | UCAUUACCAGCGACUGCCCCCACACAUUCUCUGGGCCACCGGGUU |
| | | GAAAAGCGGCAGCGAGACUCCGGGCACCUCAGAGUCCGCCACACC |
| | | CGAAAGUGAUAAGAAGUACUCAAUCGGGCUGGCCAUCGGAACUA |
| | | AUUCCGUGGGUUGGGCAGUGAUCACGGAUGAAUACAAAGUGCCG |
| | | UCCAAGAAGUUCAAGGUCCUGGGGAACACCGAUAGACACAGCAU |
| | | CAAGAAAAAUCUCAUCGGAGCCCUGCUGUUUGACUCCGGCGAAAC |
| | | CGCAGAAGCGACCCGGCUCAAACGUACCGCGAGGCGACGCUACAC |
| | | CCGGCGGAAGAAUCGCAUCUGCUAUCUGCAAGAGAUCUUUUCGA |
| | | ACGAAAUGGCAAAGGUCGACGACAGCUUCUUCCACCGCCUGGAAG |
| | | AAUCUUUCCUGGUGGAGGAGGACAAGAAGCAUGAACGGCAUCCU |
| | | AUCUUUGGAAACAUCGUCGACGAAGUGGCGUACCACGAAAAGUA |
| | | CCCGACCAUCUACCAUCUGCGGAAGAAGUUGGUUGACUCAACUGA |
| | | CAAGGCCGACCUCAGAUUGAUCUACUUGGCCCUCGCCCAUAUGAU |
| | | CAAAUUCCGCGGACACUUCCUGAUCGAAGGCGAUCUGAACCCUGA |
| | | UAACUCCGACGUGGAUAAGCUUUUCAUUCAACUGGUGCAGACCU |
| | | ACAACCAACUGUUCGAAGAAAACCCAAUCAAUGCUAGCGGCGUCG |
| | | AUGCCAAGGCCAUCCUGUCCGCCCGGCUGUCGAAGUCGCGGCGCC |
| | | UCGAAAACCUGAUCGCACAGCUGCCGGGAGAGAAAAAGAACGGA |
| | | CUUUUCGGCAACUUGAUCGCUCUCUCACUGGGACUCACUCCCAAU |
| | | UUCAAGUCCAAUUUUGACCUGGCCGAGGACGCGAAGCUGCAACUC |
| | | UCAAAGGACACCUACGACGACGACUUGGACAAUUUGCUGGCACA |
| | | AAUUGGCGAUCAGUACGCGGAUCUGUUCCUUGCCGCUAAGAACC |
| | | UUUCGGACGCAAUCUUGCUGUCCGAUAUCCUGCGCGUGAACACCG |
| | | AAAUAACCAAAGCGCCGCUUAGCGCCUCGAUGAUUAAGCGGUAC |
| | | GACGAGCAUCACCAGGAUCUCACGCUGCUCAAAGCGCUCGUGAGA |
| | | CAGCAACUGCCUGAAAAGUACAAGGAGAUCUUCUUCGACCAGUCC |
| | | AAGAAUGGGUACGCAGGGUACAUCGAUGGAGGCGCUAGCCAGGA |
| | | AGAGUUCUAUAAGUUCAUCAAGCCAAUCCUGGAAAAGAUGGACG |
| | | GAACCGAAGAACUGCUGGUCAAGCUGAACAGGGAGGAUCUGCUC |
| | | CGGAAACAGAGAACCUUUGACAACGGAUCCAUUCCCCACCAGAUC |
| | | CAUCUGGGUGAGCUGCACGCCAUCUUGCGGCGCCAGGAGGACUUU |
| | | UACCCAUUCCUCAAGGACAACCGGGAAAAGAUCGAGAAAAUUCU |
| | | GACGUUCCGCAUCCCGUAUUACGUGGGCCCACUGGCGCGCGGCAA |
| | | UUCGCGCUUCGCGUGGAUGACUAGAAAAUCAGAGGAAACCAUCA |
| | | CUCCUUGGAAUUUCGAGGAAGUUGUGGAUAAGGGAGCUUCGGCA |
| | | CAAAGCUUCAUCGAACGAAUGACCAACUUCGACAAGAAUCUCCCA |
| | | AACGAGAAGGUGCUUCCUAAGCACAGCCUCCUUUACGAAUACUUC |
| | | ACUGUCUACAACGAACUGACUAAAGUGAAAUACGUUACUGAAGG |
| | | AAUGAGGAAGCCGGCCUUUCUGUCCGGAGAACAGAAGAAAGCAA |
| | | UUGUCGAUCUGCUGUUCAAGACCAACCGCAAGGUGACCGUCAAGC |
| | | AGCUUAAAGAGGACUACUUCAAGAAGAUCGAGUGUUUCGACUCA |
| | | GUGGAAAUCAGCGGGGUGGAGGACAGAUUCAACGCUUCGCUGGG |
| | | AACCUAUCAUGAUCUCCUGAAGAUCAUCAAGGACAAGGACUUCC |
| | | UUGACAACGAGGAGAACGAGGACAUCCUGGAAGAUAUCGUCCUG |
| | | ACCUUGACCCUUUUCGAGGAUCGCGAGAUGAUCGAGGAGAGGCU |
| | | UAAGACCUACGCUCAUCUCUUCGACGAUAAGGUCAUGAAACAAC |
| | | UCAAGCGCCGCCGGUACACUGGUUGGGGCCGCCUCUCCCGCAAGC |
| | | UGAUCAACGGUAUUCGCGAUAAACAGAGCGGUAAAACUAUCCUG |
| | | GAUUUCCUCAAAUCGGAUGGCUUCGCUAAUCGUAACUUCAUGCA |
| | | AUUGAUCCACGACGACAGCCUGACCUUUAAGGAGGACAUCCAAA |
| | | AAGCACAAGUGUCCGGACAGGGAGACUCACUCCAUGAACACAUCG |
| | | CGAAUCUGGCCGGUUCGCCGGCGAUUAAGAAGGGAAUUCUGCAA |
| | | ACUGUGAAGGUGGUCGACGAGCUGGUGAAGGUCAUGGGACGGCA |
| | | CAAACCGGAGAAUAUCGUGAUUGAAAUGGCCCGAGAAAACCAGA |
| | | CUACCCAGAAGGGCCAGAAAAACUCCCGCGAAAGGAUGAAGCGG |
| | | AUCGAAGAAGGAAUCAAGGAGCUGGGCAGCCAGAUCCUGAAAGA |
| | | GCACCCGGUGGAAAACACGCAGCUGCAGAACGAGAAGCUCUACCU |
| | | GUACUAUUUGCAAAAUGGACGGGACAUGUACGUGGACCAAGAGC |
| | | UGGACAUCAAUCGGUUGUCUGAUUACGACGUGGACCACAUCGUU |
| | | CCACAGUCCUUUCUGAAGGAUGACUCGAUCGAUAACAAGGUGUU |
| | | GACUCGCAGCGACAAGAACAGAGGGAAGUCAGAUAAUGUGCCAU |
| | | CGGAGGAGGUCGUGAAGAAGAUGAAGAAUUACUGGCGGCAGCUC |
| | | CUGAAUGCGAAGCUGAUUACCCAGAGAAAGUUUGACAAUCUCAC |
| | | UAAAGCCGAGCGCGGCGGACUCUCAGAGCUGGAUAAGGCUGGAU |
| | | UCAUCAAACGGCAGCUGGUCGAGACUCGGCAGAUUACCAAGCACG |
| | | UGGCGCAGAUCUUGGACUCCCGCAUGAACACUAAAUACGACGAG |
| | | AACGAUAAGCUCAUCCGGGAAGUGAAGGUGAUUACCCUGAAAAG |
| | | CAAACUUGUGUCGGACUUUCGGAAGGACUUUCAGUUUUACAAAG |
| | | UGAGAGAAAUCAACAACUACCAUCACGCGCAUGACGCAUACCUCA |
| | | ACGCUGUGGUCGGUACCGCCCUGAUCAAAAAGUACCCUAAACUUG |
| | | AAUCGGAGUUUGUGUACGGAGACUACAAGGUCUACGACGUGAGG |
| | | AAGAUGAUAGCCAAGUCCGAACAGGAAAUCGGGAAAGCAACUGC |
| | | GAAAUACUUCUUUUACUCAAACAUCAUGAACUUUUUCAAGACUG |
| | | AAAUUACGCUGGCCAAUGGAGAAAUCAGGAAGAGGCCACUGAUC |
| | | GAAACUAACGGAGAAACGGGCGAAAUCGUGUGGGACAAGGGCAG |
| | | GGACUUCGCAACUGUUCGCAAAGUGCUCUCUAUGCCGCAAGUCAA |
| | | UAUUGUGAAGAAAACCGAAGUGCAAACCGGCGGAUUUUCAAAGG |
| | | AAUCGAUCCUCCCAAAGAGAAAUAGCGACAAGCUCAUUGCACGCA |
| | | AGAAAGACUGGGACCCGAAGAAGUACGGAGGAUUCGAUUCGCCG |
| | | ACUGUCGCAUACUCCGUCCUCGUGGUGGCCAAGGUGGAGAAGGG |
| | | AAAGAGCAAAAAGCUCAAAUCCGUCAAAGAGCUGCUGGGGAUUA |
| | | CCAUCAUGGAACGAUCCUCGUUCGAGAAGAACCCGAUUGAUUUCC |
| | | UCGAGGCGAAGGGUUACAAGGAGGUGAAGAAGGAUCUGAUCAUC |
| | | AAACUCCCCAAGUACUCACUGUUCGAACUGGAAAAUGGUCGGAA |
| | | GCGCAUGCUGGCUUCGGCCGGAGAACUCCAAAAAGGAAAUGAGC |
| | | UGGCCUUGCCUAGCAAGUACGUCAACUUCCUCUAUCUUGCUUCGC |
| | | ACUACGAAAAACUCAAAGGGUCACCGGAAGAUAACGAACAGAAG |
| | | CAGCUUUUCGUGGAGCAGCACAAGCAUUAUCUGGAUGAAAUCAU |
| | | CGAACAAAUCUCCGAGUUUUCAAAGCGCGUGAUCCUCGCCGACGC |
| | | CAACCUCGACAAAGUCCUGUCGGCCUACAAUAAGCAUAGAGAUA |
| | | AGCCGAUCAGAGAACAGGCCGAGAACAUUAUCCACUUGUUCACCC |
| | | UGACUAACCUGGGAGCCCCAGCCGCCUUCAAGUACUUCGAUACUA |
| | | CUAUCGAUCGCAAAAGAUACACGUCCACCAAGGAAGUUCUGGAC |
| | | GCGACCCUGAUCCACCAAAGCAUCACUGGACUCUACGAAACUAGG |
| | | AUCGAUCUGUCGCAGCUGGGUGGCGAUUCUGGUGGUUCUACUAA |
| | | UCUGUCAGAUAUUAUUGAAAAGGAGACCGGUAAGCAACUGGUUA |
| | | UCCAGGAAUCCAUCCUCAUGCUCCCAGAGGAGGUGGAAGAAGUC |
| | | AUUGGGAACAAGCCGGAAAGCGAUAUACUCGUGCACACCGCCUAC |
| | | GACGAGAGCACCGACGAGAAUGUCAUGCUUCUGACUAGCGACGCC |
| | | CCUGAAUACAAGCCUUGGGCUCUGGUCAUACAGGAUAGCAACGG |
| | | UGAGAACAAGAUUAAGAUGCUCUCUGGUGGUUCUCCCAAGAAGA |
| | | AGAGGAAAGUCUAAUAGUCUAGCCAUCACAUUUAAAAGCAUCUC |
| | | AGCCUACCAUGAGAAUAAGAGAAAGAAAAUGAAGAUCAAUAGCU |
| | | UAUUCAUCUCUUUUUCUUUUUCGUUGGUGUAAAGCCAACACCCU |
| | | GUCUAAAAAACAUAAAUUUCUUUAAUCAUUUUGCCUCUUUUCUC |
| | | UGUGCUUCAAUUAAUAAAAAAUGGAAAGAACCUCGAGAAAAAAA |
| | | AAAAAAAAAAAAAAAAAAAAAAAGCGAAAAAAAAAAAAAAAAAA |
| | | AAAAAAAAAAAACCGAAAAAAAAAAAAAAAAAAAAAAAAAAAAA |
| | | AAAAAAAAAAU |
| 11 | Open reading | AUGAGCUCAGAGACUGGCCCAGUGGCUGUGGACCCCACAUUGAG |
| | frame for BE3 | ACGGCGGAUCGAGCCCCAUGAGUUUGAGGUAUUCUUCGAUCCGA |
| | | GAGAGCUCCGCAAGGAGACCUGCCUGCUUUACGAAAUUAAUUGG |
| | | GGGGGCCGGCACUCCAUUUGGCGACAUACAUCACAGAACACUAAC |
| | | AAGCACGUCGAAGUCAACUUCAUCGAGAAGUUCACGACAGAAAG |
| | | AUAUUUCUGUCCGAACACAAGGUGCAGCAUUACCUGGUUUCUCA |
| | | GCUGGAGCCCAUGCGGCGAAUGUAGUAGGGCCAUCACUGAAUUC |
| | | CUGUCAAGGUAUCCCCACGUCACUCUGUUUAUUUACAUCGCAAGG |
| | | CUGUACCACCACGCUGACCCCCGCAAUCGACAAGGCCUGCGGGAU |
| | | UUGAUCUCUUCAGGUGUGACUAUCCAAAUUAUGACUGAGCAGGA |
| | | GUCAGGAUACUGCUGGAGAAACUUUGUGAAUUAUAGCCCGAGUA |
| | | AUGAAGCCCACUGGCCUAGGUAUCCCCAUCUGUGGGUACGACUGU |
| | | ACGUUCUUGAACUGUACUGCAUCAUACUGGGCCUGCCUCCUUGUC |
| | | UCAACAUUCUGAGAAGGAAGCAGCCACAGCUGACAUUCUUUACC |
| | | AUCGCUCUUCAGUCUUGUCAUUACCAGCGACUGCCCCCACACAUU |
| | | CUCUGGGCCACCGGGUUGAAAAGCGGCAGCGAGACUCCGGGCACC |
| | | UCAGAGUCCGCCACACCCGAAAGUGAUAAGAAGUACUCAAUCGG |
| | | GCUGGCCAUCGGAACUAAUUCCGUGGGUUGGGCAGUGAUCACGG |
| | | AUGAAUACAAAGUGCCGUCCAAGAAGUUCAAGGUCCUGGGGAAC |
| | | ACCGAUAGACACAGCAUCAAGAAAAAUCUCAUCGGAGCCCUGCUG |
| | | UUUGACUCCGGCGAAACCGCAGAAGCGACCCGGCUCAAACGUACC |
| | | GCGAGGCGACGCUACACCCGGCGGAAGAAUCGCAUCUGCUAUCUG |
| | | CAAGAGAUCUUUUCGAACGAAAUGGCAAAGGUCGACGACAGCUU |
| | | CUUCCACCGCCUGGAAGAAUCUUUCCUGGUGGAGGAGGACAAGA |
| | | AGCAUGAACGGCAUCCUAUCUUUGGAAACAUCGUCGACGAAGUG |
| | | GCGUACCACGAAAAGUACCCGACCAUCUACCAUCUGCGGAAGAAG |
| | | UUGGUUGACUCAACUGACAAGGCCGACCUCAGAUUGAUCUACUU |
| | | GGCCCUCGCCCAUAUGAUCAAAUUCCGCGGACACUUCCUGAUCGA |
| | | AGGCGAUCUGAACCCUGAUAACUCCGACGUGGAUAAGCUUUUCA |
| | | UUCAACUGGUGCAGACCUACAACCAACUGUUCGAAGAAAACCCAA |
| | | UCAAUGCUAGCGGCGUCGAUGCCAAGGCCAUCCUGUCCGCCCGGC |
| | | UGUCGAAGUCGCGGCGCCUCGAAAACCUGAUCGCACAGCUGCCGG |
| | | GAGAGAAAAAGAACGGACUUUUCGGCAACUUGAUCGCUCUCUCA |
| | | CUGGGACUCACUCCCAAUUUCAAGUCCAAUUUUGACCUGGCCGAG |
| | | GACGCGAAGCUGCAACUCUCAAAGGACACCUACGACGACGACUUG |
| | | GACAAUUUGCUGGCACAAAUUGGCGAUCAGUACGCGGAUCUGUU |
| | | CCUUGCCGCUAAGAACCUUUCGGACGCAAUCUUGCUGUCCGAUAU |
| | | CCUGCGCGUGAACACCGAAAUAACCAAAGCGCCGCUUAGCGCCUC |
| | | GAUGAUUAAGCGGUACGACGAGCAUCACCAGGAUCUCACGCUGC |
| | | UCAAAGCGCUCGUGAGACAGCAACUGCCUGAAAAGUACAAGGAG |
| | | AUCUUCUUCGACCAGUCCAAGAAUGGGUACGCAGGGUACAUCGA |
| | | UGGAGGCGCUAGCCAGGAAGAGUUCUAUAAGUUCAUCAAGCCAA |
| | | UCCUGGAAAAGAUGGACGGAACCGAAGAACUGCUGGUCAAGCUG |
| | | AACAGGGAGGAUCUGCUCCGGAAACAGAGAACCUUUGACAACGG |
| | | AUCCAUUCCCCACCAGAUCCAUCUGGGUGAGCUGCACGCCAUCUU |
| | | GCGGCGCCAGGAGGACUUUUACCCAUUCCUCAAGGACAACCGGGA |
| | | AAAGAUCGAGAAAAUUCUGACGUUCCGCAUCCCGUAUUACGUGG |
| | | GCCCACUGGCGCGCGGCAAUUCGCGCUUCGCGUGGAUGACUAGAA |
| | | AAUCAGAGGAAACCAUCACUCCUUGGAAUUUCGAGGAAGUUGUG |
| | | GAUAAGGGAGCUUCGGCACAAAGCUUCAUCGAACGAAUGACCAA |
| | | CUUCGACAAGAAUCUCCCAAACGAGAAGGUGCUUCCUAAGCACAG |
| | | CCUCCUUUACGAAUACUUCACUGUCUACAACGAACUGACUAAAGU |
| | | GAAAUACGUUACUGAAGGAAUGAGGAAGCCGGCCUUUCUGUCCG |
| | | GAGAACAGAAGAAAGCAAUUGUCGAUCUGCUGUUCAAGACCAAC |
| | | CGCAAGGUGACCGUCAAGCAGCUUAAAGAGGACUACUUCAAGAA |
| | | GAUCGAGUGUUUCGACUCAGUGGAAAUCAGCGGGGUGGAGGACA |
| | | GAUUCAACGCUUCGCUGGGAACCUAUCAUGAUCUCCUGAAGAUC |
| | | AUCAAGGACAAGGACUUCCUUGACAACGAGGAGAACGAGGACAU |
| | | CCUGGAAGAUAUCGUCCUGACCUUGACCCUUUUCGAGGAUCGCGA |
| | | GAUGAUCGAGGAGAGGCUUAAGACCUACGCUCAUCUCUUCGACG |
| | | AUAAGGUCAUGAAACAACUCAAGCGCCGCCGGUACACUGGUUGG |
| | | GGCCGCCUCUCCCGCAAGCUGAUCAACGGUAUUCGCGAUAAACAG |
| | | AGCGGUAAAACUAUCCUGGAUUUCCUCAAAUCGGAUGGCUUCGC |
| | | UAAUCGUAACUUCAUGCAAUUGAUCCACGACGACAGCCUGACCUU |
| | | UAAGGAGGACAUCCAAAAAGCACAAGUGUCCGGACAGGGAGACU |
| | | CACUCCAUGAACACAUCGCGAAUCUGGCCGGUUCGCCGGCGAUUA |
| | | AGAAGGGAAUUCUGCAAACUGUGAAGGUGGUCGACGAGCUGGUG |
| | | AAGGUCAUGGGACGGCACAAACCGGAGAAUAUCGUGAUUGAAAU |
| | | GGCCCGAGAAAACCAGACUACCCAGAAGGGCCAGAAAAACUCCCG |
| | | CGAAAGGAUGAAGCGGAUCGAAGAAGGAAUCAAGGAGCUGGGCA |
| | | GCCAGAUCCUGAAAGAGCACCCGGUGGAAAACACGCAGCUGCAGA |
| | | ACGAGAAGCUCUACCUGUACUAUUUGCAAAAUGGACGGGACAUG |
| | | UACGUGGACCAAGAGCUGGACAUCAAUCGGUUGUCUGAUUACGA |
| | | CGUGGACCACAUCGUUCCACAGUCCUUUCUGAAGGAUGACUCGAU |
| | | CGAUAACAAGGUGUUGACUCGCAGCGACAAGAACAGAGGGAAGU |
| | | CAGAUAAUGUGCCAUCGGAGGAGGUCGUGAAGAAGAUGAAGAAU |
| | | UACUGGCGGCAGCUCCUGAAUGCGAAGCUGAUUACCCAGAGAAA |
| | | GUUUGACAAUCUCACUAAAGCCGAGCGCGGCGGACUCUCAGAGCU |
| | | GGAUAAGGCUGGAUUCAUCAAACGGCAGCUGGUCGAGACUCGGC |
| | | AGAUUACCAAGCACGUGGCGCAGAUCUUGGACUCCCGCAUGAACA |
| | | CUAAAUACGACGAGAACGAUAAGCUCAUCCGGGAAGUGAAGGUG |
| | | AUUACCCUGAAAAGCAAACUUGUGUCGGACUUUCGGAAGGACUU |
| | | UCAGUUUUACAAAGUGAGAGAAAUCAACAACUACCAUCACGCGC |
| | | AUGACGCAUACCUCAACGCUGUGGUCGGUACCGCCCUGAUCAAAA |
| | | AGUACCCUAAACUUGAAUCGGAGUUUGUGUACGGAGACUACAAG |
| | | GUCUACGACGUGAGGAAGAUGAUAGCCAAGUCCGAACAGGAAAU |
| | | CGGGAAAGCAACUGCGAAAUACUUCUUUUACUCAAACAUCAUGA |
| | | ACUUUUUCAAGACUGAAAUUACGCUGGCCAAUGGAGAAAUCAGG |
| | | AAGAGGCCACUGAUCGAAACUAACGGAGAAACGGGCGAAAUCGU |
| | | GUGGGACAAGGGCAGGGACUUCGCAACUGUUCGCAAAGUGCUCU |
| | | CUAUGCCGCAAGUCAAUAUUGUGAAGAAAACCGAAGUGCAAACC |
| | | GGCGGAUUUUCAAAGGAAUCGAUCCUCCCAAAGAGAAAUAGCGA |
| | | CAAGCUCAUUGCACGCAAGAAAGACUGGGACCCGAAGAAGUACG |
| | | GAGGAUUCGAUUCGCCGACUGUCGCAUACUCCGUCCUCGUGGUGG |
| | | CCAAGGUGGAGAAGGGAAAGAGCAAAAAGCUCAAAUCCGUCAAA |
| | | GAGCUGCUGGGGAUUACCAUCAUGGAACGAUCCUCGUUCGAGAA |
| | | GAACCCGAUUGAUUUCCUCGAGGCGAAGGGUUACAAGGAGGUGA |
| | | AGAAGGAUCUGAUCAUCAAACUCCCCAAGUACUCACUGUUCGAAC |
| | | UGGAAAAUGGUCGGAAGCGCAUGCUGGCUUCGGCCGGAGAACUC |
| | | CAAAAAGGAAAUGAGCUGGCCUUGCCUAGCAAGUACGUCAACUU |
| | | CCUCUAUCUUGCUUCGCACUACGAAAAACUCAAAGGGUCACCGGA |
| | | AGAUAACGAACAGAAGCAGCUUUUCGUGGAGCAGCACAAGCAUU |
| | | AUCUGGAUGAAAUCAUCGAACAAAUCUCCGAGUUUUCAAAGCGC |
| | | GUGAUCCUCGCCGACGCCAACCUCGACAAAGUCCUGUCGGCCUAC |
| | | AAUAAGCAUAGAGAUAAGCCGAUCAGAGAACAGGCCGAGAACAU |
| | | UAUCCACUUGUUCACCCUGACUAACCUGGGAGCCCCAGCCGCCUU |
| | | CAAGUACUUCGAUACUACUAUCGAUCGCAAAAGAUACACGUCCAC |
| | | CAAGGAAGUUCUGGACGCGACCCUGAUCCACCAAAGCAUCACUGG |
| | | ACUCUACGAAACUAGGAUCGAUCUGUCGCAGCUGGGUGGCGAUU |
| | | CUGGUGGUUCUACUAAUCUGUCAGAUAUUAUUGAAAAGGAGACC |
| | | GGUAAGCAACUGGUUAUCCAGGAAUCCAUCCUCAUGCUCCCAGAG |
| | | GAGGUGGAAGAAGUCAUUGGGAACAAGCCGGAAAGCGAUAUACU |
| | | CGUGCACACCGCCUACGACGAGAGCACCGACGAGAAUGUCAUGCU |
| | | UCUGACUAGCGACGCCCCUGAAUACAAGCCUUGGGCUCUGGUCAU |
| | | ACAGGAUAGCAACGGUGAGAACAAGAUUAAGAUGCUCUCUGGUG |
| | | GUUCUCCCAAGAAGAAGAGGAAAGUCUAA |
| 12 | Amino acid | MSSETGPVAVDPTLRRRIEPHEFEVFFDPRELRKETCLLYEINWGGRHSI |
| | sequence for BE3 | WRHTSQNTNKHVEVNFIEKFTTERYFCPNTRCSITWFLSWSPCGECSRA |
| | | ITEFLSRYPHVTLFIYIARLYHHADPRNRQGLRDLISSGVTIQIMTEQESG |
| | | YCWRNFVNYSPSNEAHWPRYPHLWVRLYVLELYCIILGLPPCLNILRR |
| | | KQPQLTFFTIALQSCHYQRLPPHILWATGLKSGSETPGTSESATPESDKK |
| | | YSIGLAIGTNSVGWAVITDEYKVPSKKFKVLGNTDRHSIKKNLIGALLF |
| | | DSGETAEATRLKRTARRRYTRRKNRICYLQEIFSNEMAKVDDSFFHRL |
| | | EESFLVEEDKKHERHPIFGNIVDEVAYHEKYPTIYHLRKKLVDSTDKAD |
| | | LRLIYLALAHMIKFRGHFLIEGDLNPDNSDVDKLFIQLVQTYNQLFEEN |
| | | PINASGVDAKAILSARLSKSRRLENLIAQLPGEKKNGLFGNLIALSLGLT |
| | | PNFKSNFDLAEDAKLQLSKDTYDDDLDNLLAQIGDQYADLFLAAKNL |
| | | SDAILLSDILRVNTEITKAPLSASMIKRYDEHHQDLTLLKALVRQQLPE |
| | | KYKEIFFDQSKNGYAGYIDGGASQEEFYKFIKPILEKMDGTEELLVKLN |
| | | REDLLRKQRTFDNGSIPHQIHLGELHAILRRQEDFYPFLKDNREKIEKIL |
| | | TFRIPYYVGPLARGNSRFAWMTRKSEETITPWNFEEVVDKGASAQSFIE |
| | | RMTNFDKNLPNEKVLPKHSLLYEYFTVYNELTKVKYVTEGMRKPAFL |
| | | SGEQKKAIVDLLFKTNRKVTVKQLKEDYFKKIECFDSVEISGVEDRFNA |
| | | SLGTYHDLLKIIKDKDFLDNEENEDILEDIVLTLTLFEDREMIEERLKTY |
| | | AHLFDDKVMKQLKRRRYTGWGRLSRKLINGIRDKQSGKTILDFLKSD |
| | | GFANRNFMQLIHDDSLTFKEDIQKAQVSGQGDSLHEHIANLAGSPAIK |
| | | KGILQTVKVVDELVKVMGRHKPENIVIEMARENQTTQKGQKNSRERM |
| | | KRIEEGIKELGSQILKEHPVENTQLQNEKLYLYYLQNGRDMYVDQELD |
| | | INRLSDYDVDHIVPQSFLKDDSIDNKVLTRSDKNRGKSDNVPSEEVVK |
| | | KMKNYWRQLLNAKLITQRKFDNLTKAERGGLSELDKAGFIKRQLVET |
| | | RQITKHVAQILDSRMNTKYDENDKLIREVKVITLKSKLVSDFRKDFQFY |
| | | KVREINNYHHAHDAYLNAVVGTALIKKYPKLESEFVYGDYKVYDVRK |
| | | MIAKSEQEIGKATAKYFFYSNIMNFFKTEITLANGEIRKRPLIETNGETG |
| | | EIVWDKGRDFATVRKVLSMPQVNIVKKTEVQTGGFSKESILPKRNSDK |
| | | LIARKKDWDPKKYGGFDSPTVAYSVLVVAKVEKGKSKKLKSVKELLG |
| | | ITIMERSSFEKNPIDFLEAKGYKEVKKDLIIKLPKYSLFELENGRKRMLA |
| | | SAGELQKGNELALPSKYVNFLYLASHYEKLKGSPEDNEQKQLFVEQH |
| | | KHYLDEIIEQISEFSKRVILADANLDKVLSAYNKHRDKPIREQAENIIHL |
| | | FTLTNLGAPAAFKYFDTTIDRKRYTSTKEVLDATLIHQSITGLYETRIDL |
| | | SQLGGDSGGSTNLSDIIEKETGKQLVIQESILMLPEEVEEVIGNKPESDIL |
| | | VHTAYDESTDENVMLLTSDAPEYKPWALVIQDSNGENKIKMLSGGSP |
| | | KKKRKV |
| 13 | mRNA encoding | GGGAGACCCAAGCUGGCUAGCUCCCGCAGUCGGCGUCCAGCGGCU |
| | UGI | CUGCUUGUUCGUGUGUGUGUCGUUGCAGGCCUUAUUCGGAUCCG |
| | | CCACCAUGGGACCGAAGAAGAAGAGAAAGGUCGGAGGAGGAAGC |
| | | ACAAACCUGUCGGACAUCAUCGAAAAGGAAACAGGAAAGCAGCU |
| | | GGUCAUCCAGGAAUCGAUCCUGAUGCUGCCGGAAGAAGUCGAAG |
| | | AAGUCAUCGGAAACAAGCCGGAAUCGGACAUCCUGGUCCACACAG |
| | | CAUACGACGAAUCGACAGACGAAAACGUCAUGCUGCUGACAUCG |
| | | GACGCACCGGAAUACAAGCCGUGGGCACUGGUCAUCCAGGACUCG |
| | | AACGGAGAAAACAAGAUCAAGAUGCUGUGAUAGUCUAGACAUCA |
| | | CAUUUAAAAGCAUCUCAGCCUACCAUGAGAAUAAGAGAAAGAAA |
| | | AUGAAGAUCAAUAGCUUAUUCAUCUCUUUUUCUUUUUCGUUGGU |
| | | GUAAAGCCAACACCCUGUCUAAAAAACAUAAAUUUCUUUAAUCA |
| | | UUUUGCCUCUUUUCUCUGUGCUUCAAUUAAUAAAAAAUGGAAAG |
| | | AACCUCGAGUCUAG |
| 14 | Open reading | AUGGGACCGAAGAAGAAGAGAAAGGUCGGAGGAGGAAGCACAAA |
| | frame for UGI | CCUGUCGGACAUCAUCGAAAAGGAAACAGGAAAGCAGCUGGUCA |
| | | UCCAGGAAUCGAUCCUGAUGCUGCCGGAAGAAGUCGAAGAAGUC |
| | | AUCGGAAACAAGCCGGAAUCGGACAUCCUGGUCCACACAGCAUAC |
| | | GACGAAUCGACAGACGAAAACGUCAUGCUGCUGACAUCGGACGC |
| | | ACCGGAAUACAAGCCGUGGGCACUGGUCAUCCAGGACUCGAACGG |
| | | AGAAAACAAGAUCAAGAUGCUGUGA |
| 15 | Amino acid | MTNLSDIIEKETGKQLVIQESILMLPEEVEEVIGNKPESDILVHTAYDES |
| | sequence for UGI | TDENVMLLTSDAPEYKPWALVIQDSNGENKIKMLSGGSKRTADGSEFE |
| | | SPKKKRKVE |
| 16 | mRNA encoding | GGGAAGCUCAGAAUAAACGCUCAACUUUGGCCGGAUCUGCCACCA |
| | BC22 with 2x | UGGAGGCCUCCCCCGCCUCCGGCCCCCGGCACCUGAUGGACCCCC |
| | UGI | ACAUCUUCACCUCCAACUUCAACAACGGCAUCGGCCGGCACAAGA |
| | | CCUACCUGUGCUACGAGGUGGAGCGGCUGGACAACGGCACCUCCG |
| | | UGAAGAUGGACCAGCACCGGGGCUUCCUGCACAACCAGGCCAAGA |
| | | ACCUGCUGUGCGGCUUCUACGGCCGGCACGCCGAGCUGCGGUUCC |
| | | UGGACCUGGUGCCCUCCCUGCAGCUGGACCCCGCCCAGAUCUACC |
| | | GGGUGACCUGGUUCAUCUCCUGGUCCCCCUGCUUCUCCUGGGGCU |
| | | GCGCCGGCGAGGUGCGGGCCUUCCUGCAGGAGAACACCCACGUGC |
| | | GGCUGCGGAUCUUCGCCGCCCGGAUCUACGACUACGACCCCCUGU |
| | | ACAAGGAGGCCCUGCAGAUGCUGCGGGACGCCGGCGCCCAGGUGU |
| | | CCAUCAUGACCUACGACGAGUUCAAGCACUGCUGGGACACCUUCG |
| | | UGGACCACCAGGGCUGCCCCUUCCAGCCCUGGGACGGCCUGGACG |
| | | AGCACUCCCAGGCCCUGUCCGGCCGGCUGCGGGCCAUCCUGCAGA |
| | | ACCAGGGCAACUCCGGCUCCGAGACCCCCGGCACCUCCGAGUCCG |
| | | CCACCCCCGAGUCCGACAAGAAGUACUCCAUCGGCCUGGCCAUCG |
| | | GCACCAACUCCGUGGGCUGGGCCGUGAUCACCGACGAGUACAAGG |
| | | UGCCCUCCAAGAAGUUCAAGGUGCUGGGCAACACCGACCGGCACU |
| | | CCAUCAAGAAGAACCUGAUCGGCGCCCUGCUGUUCGACUCCGGCG |
| | | AGACCGCCGAGGCCACCCGGCUGAAGCGGACCGCCCGGCGGCGGU |
| | | ACACCCGGCGGAAGAACCGGAUCUGCUACCUGCAGGAGAUCUUCU |
| | | CCAACGAGAUGGCCAAGGUGGACGACUCCUUCUUCCACCGGCUGG |
| | | AGGAGUCCUUCCUGGUGGAGGAGGACAAGAAGCACGAGCGGCAC |
| | | CCCAUCUUCGGCAACAUCGUGGACGAGGUGGCCUACCACGAGAAG |
| | | UACCCCACCAUCUACCACCUGCGGAAGAAGCUGGUGGACUCCACC |
| | | GACAAGGCCGACCUGCGGCUGAUCUACCUGGCCCUGGCCCACAUG |
| | | AUCAAGUUCCGGGGCCACUUCCUGAUCGAGGGCGACCUGAACCCC |
| | | GACAACUCCGACGUGGACAAGCUGUUCAUCCAGCUGGUGCAGACC |
| | | UACAACCAGCUGUUCGAGGAGAACCCCAUCAACGCCUCCGGCGUG |
| | | GACGCCAAGGCCAUCCUGUCCGCCCGGCUGUCCAAGUCCCGGCGG |
| | | CUGGAGAACCUGAUCGCCCAGCUGCCCGGCGAGAAGAAGAACGGC |
| | | CUGUUCGGCAACCUGAUCGCCCUGUCCCUGGGCCUGACCCCCAAC |
| | | UUCAAGUCCAACUUCGACCUGGCCGAGGACGCCAAGCUGCAGCUG |
| | | UCCAAGGACACCUACGACGACGACCUGGACAACCUGCUGGCCCAG |
| | | AUCGGCGACCAGUACGCCGACCUGUUCCUGGCCGCCAAGAACCUG |
| | | UCCGACGCCAUCCUGCUGUCCGACAUCCUGCGGGUGAACACCGAG |
| | | AUCACCAAGGCCCCCCUGUCCGCCUCCAUGAUCAAGCGGUACGAC |
| | | GAGCACCACCAGGACCUGACCCUGCUGAAGGCCCUGGUGCGGCAG |
| | | CAGCUGCCCGAGAAGUACAAGGAGAUCUUCUUCGACCAGUCCAAG |
| | | AACGGCUACGCCGGCUACAUCGACGGCGGCGCCUCCCAGGAGGAG |
| | | UUCUACAAGUUCAUCAAGCCCAUCCUGGAGAAGAUGGACGGCACC |
| | | GAGGAGCUGCUGGUGAAGCUGAACCGGGAGGACCUGCUGCGGAA |
| | | GCAGCGGACCUUCGACAACGGCUCCAUCCCCCACCAGAUCCACCU |
| | | GGGCGAGCUGCACGCCAUCCUGCGGCGGCAGGAGGACUUCUACCC |
| | | CUUCCUGAAGGACAACCGGGAGAAGAUCGAGAAGAUCCUGACCU |
| | | UCCGGAUCCCCUACUACGUGGGCCCCCUGGCCCGGGGCAACUCCC |
| | | GGUUCGCCUGGAUGACCCGGAAGUCCGAGGAGACCAUCACCCCCU |
| | | GGAACUUCGAGGAGGUGGUGGACAAGGGCGCCUCCGCCCAGUCCU |
| | | UCAUCGAGCGGAUGACCAACUUCGACAAGAACCUGCCCAACGAGA |
| | | AGGUGCUGCCCAAGCACUCCCUGCUGUACGAGUACUUCACCGUGU |
| | | ACAACGAGCUGACCAAGGUGAAGUACGUGACCGAGGGCAUGCGG |
| | | AAGCCCGCCUUCCUGUCCGGCGAGCAGAAGAAGGCCAUCGUGGAC |
| | | CUGCUGUUCAAGACCAACCGGAAGGUGACCGUGAAGCAGCUGAA |
| | | GGAGGACUACUUCAAGAAGAUCGAGUGCUUCGACUCCGUGGAGA |
| | | UCUCCGGCGUGGAGGACCGGUUCAACGCCUCCCUGGGCACCUACC |
| | | ACGACCUGCUGAAGAUCAUCAAGGACAAGGACUUCCUGGACAAC |
| | | GAGGAGAACGAGGACAUCCUGGAGGACAUCGUGCUGACCCUGAC |
| | | CCUGUUCGAGGACCGGGAGAUGAUCGAGGAGCGGCUGAAGACCU |
| | | ACGCCCACCUGUUCGACGACAAGGUGAUGAAGCAGCUGAAGCGGC |
| | | GGCGGUACACCGGCUGGGGCCGGCUGUCCCGGAAGCUGAUCAACG |
| | | GCAUCCGGGACAAGCAGUCCGGCAAGACCAUCCUGGACUUCCUGA |
| | | AGUCCGACGGCUUCGCCAACCGGAACUUCAUGCAGCUGAUCCACG |
| | | ACGACUCCCUGACCUUCAAGGAGGACAUCCAGAAGGCCCAGGUGU |
| | | CCGGCCAGGGCGACUCCCUGCACGAGCACAUCGCCAACCUGGCCG |
| | | GCUCCCCCGCCAUCAAGAAGGGCAUCCUGCAGACCGUGAAGGUGG |
| | | UGGACGAGCUGGUGAAGGUGAUGGGCCGGCACAAGCCCGAGAAC |
| | | AUCGUGAUCGAGAUGGCCCGGGAGAACCAGACCACCCAGAAGGGC |
| | | CAGAAGAACUCCCGGGAGCGGAUGAAGCGGAUCGAGGAGGGCAU |
| | | CAAGGAGCUGGGCUCCCAGAUCCUGAAGGAGCACCCCGUGGAGAA |
| | | CACCCAGCUGCAGAACGAGAAGCUGUACCUGUACUACCUGCAGAA |
| | | CGGCCGGGACAUGUACGUGGACCAGGAGCUGGACAUCAACCGGCU |
| | | GUCCGACUACGACGUGGACCACAUCGUGCCCCAGUCCUUCCUGAA |
| | | GGACGACUCCAUCGACAACAAGGUGCUGACCCGGUCCGACAAGAA |
| | | CCGGGGCAAGUCCGACAACGUGCCCUCCGAGGAGGUGGUGAAGA |
| | | AGAUGAAGAACUACUGGCGGCAGCUGCUGAACGCCAAGCUGAUC |
| | | ACCCAGCGGAAGUUCGACAACCUGACCAAGGCCGAGCGGGGCGGC |
| | | CUGUCCGAGCUGGACAAGGCCGGCUUCAUCAAGCGGCAGCUGGUG |
| | | GAGACCCGGCAGAUCACCAAGCACGUGGCCCAGAUCCUGGACUCC |
| | | CGGAUGAACACCAAGUACGACGAGAACGACAAGCUGAUCCGGGA |
| | | GGUGAAGGUGAUCACCCUGAAGUCCAAGCUGGUGUCCGACUUCC |
| | | GGAAGGACUUCCAGUUCUACAAGGUGCGGGAGAUCAACAACUAC |
| | | CACCACGCCCACGACGCCUACCUGAACGCCGUGGUGGGCACCGCC |
| | | CUGAUCAAGAAGUACCCCAAGCUGGAGUCCGAGUUCGUGUACGG |
| | | CGACUACAAGGUGUACGACGUGCGGAAGAUGAUCGCCAAGUCCG |
| | | AGCAGGAGAUCGGCAAGGCCACCGCCAAGUACUUCUUCUACUCCA |
| | | ACAUCAUGAACUUCUUCAAGACCGAGAUCACCCUGGCCAACGGCG |
| | | AGAUCCGGAAGCGGCCCCUGAUCGAGACCAACGGCGAGACCGGCG |
| | | AGAUCGUGUGGGACAAGGGCCGGGACUUCGCCACCGUGCGGAAG |
| | | GUGCUGUCCAUGCCCCAGGUGAACAUCGUGAAGAAGACCGAGGU |
| | | GCAGACCGGCGGCUUCUCCAAGGAGUCCAUCCUGCCCAAGCGGAA |
| | | CUCCGACAAGCUGAUCGCCCGGAAGAAGGACUGGGACCCCAAGAA |
| | | GUACGGCGGCUUCGACUCCCCCACCGUGGCCUACUCCGUGCUGGU |
| | | GGUGGCCAAGGUGGAGAAGGGCAAGUCCAAGAAGCUGAAGUCCG |
| | | UGAAGGAGCUGCUGGGCAUCACCAUCAUGGAGCGGUCCUCCUUCG |
| | | AGAAGAACCCCAUCGACUUCCUGGAGGCCAAGGGCUACAAGGAG |
| | | GUGAAGAAGGACCUGAUCAUCAAGCUGCCCAAGUACUCCCUGUUC |
| | | GAGCUGGAGAACGGCCGGAAGCGGAUGCUGGCCUCCGCCGGCGAG |
| | | CUGCAGAAGGGCAACGAGCUGGCCCUGCCCUCCAAGUACGUGAAC |
| | | UUCCUGUACCUGGCCUCCCACUACGAGAAGCUGAAGGGCUCCCCC |
| | | GAGGACAACGAGCAGAAGCAGCUGUUCGUGGAGCAGCACAAGCA |
| | | CUACCUGGACGAGAUCAUCGAGCAGAUCUCCGAGUUCUCCAAGCG |
| | | GGUGAUCCUGGCCGACGCCAACCUGGACAAGGUGCUGUCCGCCUA |
| | | CAACAAGCACCGGGACAAGCCCAUCCGGGAGCAGGCCGAGAACAU |
| | | CAUCCACCUGUUCACCCUGACCAACCUGGGCGCCCCCGCCGCCUU |
| | | CAAGUACUUCGACACCACCAUCGACCGGAAGCGGUACACCUCCAC |
| | | CAAGGAGGUGCUGGACGCCACCCUGAUCCACCAGUCCAUCACCGG |
| | | CCUGUACGAGACCCGGAUCGACCUGUCCCAGCUGGGCGGCGACUC |
| | | CGGCGGCUCCGGCGGCUCCGGCGGCUCCACCAACCUGUCCGACAU |
| | | CAUCGAGAAGGAGACCGGCAAGCAGCUGGUGAUCCAGGAGUCCA |
| | | UCCUGAUGCUGCCCGAGGAGGUGGAGGAGGUGAUCGGCAACAAG |
| | | CCCGAGUCCGACAUCCUGGUGCACACCGCCUACGACGAGUCCACC |
| | | GACGAGAACGUGAUGCUGCUGACCUCCGACGCCCCCGAGUACAAG |
| | | CCCUGGGCCCUGGUGAUCCAGGACUCCAACGGCGAGAACAAGAUC |
| | | AAGAUGCUGUCCGGCGGCUCCGGCGGCUCCGGCGGCUCCACCAAC |
| | | CUGUCCGACAUCAUCGAGAAGGAGACCGGCAAGCAGCUGGUGAU |
| | | CCAGGAGUCCAUCCUGAUGCUGCCCGAGGAGGUGGAGGAGGUGA |
| | | UCGGCAACAAGCCCGAGUCCGACAUCCUGGUGCACACCGCCUACG |
| | | ACGAGUCCACCGACGAGAACGUGAUGCUGCUGACCUCCGACGCCC |
| | | CCGAGUACAAGCCCUGGGCCCUGGUGAUCCAGGACUCCAACGGCG |
| | | AGAACAAGAUCAAGAUGCUGUCCGGCGGCUCCAAGCGGACCGCCG |
| | | ACGGCUCCGAGUUCGAGCCCAAGAAGAAGCGGAAGGUGUGAUAG |
| | | CUAGCACCAGCCUCAAGAACACCCGAAUGGAGUCUCUAAGCUACA |
| | | UAAUACCAACUUACACUUUACAAAAUGUUGUCCCCCAAAAUGUA |
| | | GCCAUUCGUAUCUGCUCCUAAUAAAAAGAAAGUUUCUUCACAUU |
| | | CUCUCGAGAAAAAAAAAAAAUGGAAAAAAAAAAAACGGAAAAAA |
| | | AAAAAAGGUAAAAAAAAAAAAUAUAAAAAAAAAAAACAUAAAAA |
| | | AAAAAAACGAAAAAAAAAAAACGUAAAAAAAAAAAACUCAAAAA |
| | | AAAAAAAGAUAAAAAAAAAAAACCUAAAAAAAAAAAAUGUAAAA |
| | | AAAAAAAAGGGAAAAAAAAAAAACGCAAAAAAAAAAAACACAAA |
| | | AAAAAAAAAUGCAAAAAAAAAAAAUCGAAAAAAAAAAAAUCUAA |
| | | AAAAAAAAAACGAAAAAAAAAAAACCCAAAAAAAAAAAAGACAA |
| | | AAAAAAAAAAUAGAAAAAAAAAAAAGUUAAAAAAAAAAAACUGA |
| | | AAAAAAAAAAAUUUAAAAAAAAAAAAUCUAG |
| 17 | Open reading | AUGGAGGCCUCCCCCGCCUCCGGCCCCCGGCACCUGAUGGACCCC |
| | frame for BC22 | CACAUCUUCACCUCCAACUUCAACAACGGCAUCGGCCGGCACAAG |
| | with 2x UGI | ACCUACCUGUGCUACGAGGUGGAGCGGCUGGACAACGGCACCUCC |
| | | GUGAAGAUGGACCAGCACCGGGGCUUCCUGCACAACCAGGCCAAG |
| | | AACCUGCUGUGCGGCUUCUACGGCCGGCACGCCGAGCUGCGGUUC |
| | | CUGGACCUGGUGCCCUCCCUGCAGCUGGACCCCGCCCAGAUCUAC |
| | | CGGGUGACCUGGUUCAUCUCCUGGUCCCCCUGCUUCUCCUGGGGC |
| | | UGCGCCGGCGAGGUGCGGGCCUUCCUGCAGGAGAACACCCACGUG |
| | | CGGCUGCGGAUCUUCGCCGCCCGGAUCUACGACUACGACCCCCUG |
| | | UACAAGGAGGCCCUGCAGAUGCUGCGGGACGCCGGCGCCCAGGUG |
| | | UCCAUCAUGACCUACGACGAGUUCAAGCACUGCUGGGACACCUUC |
| | | GUGGACCACCAGGGCUGCCCCUUCCAGCCCUGGGACGGCCUGGAC |
| | | GAGCACUCCCAGGCCCUGUCCGGCCGGCUGCGGGCCAUCCUGCAG |
| | | AACCAGGGCAACUCCGGCUCCGAGACCCCCGGCACCUCCGAGUCC |
| | | GCCACCCCCGAGUCCGACAAGAAGUACUCCAUCGGCCUGGCCAUC |
| | | GGCACCAACUCCGUGGGCUGGGCCGUGAUCACCGACGAGUACAAG |
| | | GUGCCCUCCAAGAAGUUCAAGGUGCUGGGCAACACCGACCGGCAC |
| | | UCCAUCAAGAAGAACCUGAUCGGCGCCCUGCUGUUCGACUCCGGC |
| | | GAGACCGCCGAGGCCACCCGGCUGAAGCGGACCGCCCGGCGGCGG |
| | | UACACCCGGCGGAAGAACCGGAUCUGCUACCUGCAGGAGAUCUUC |
| | | UCCAACGAGAUGGCCAAGGUGGACGACUCCUUCUUCCACCGGCUG |
| | | GAGGAGUCCUUCCUGGUGGAGGAGGACAAGAAGCACGAGCGGCA |
| | | CCCCAUCUUCGGCAACAUCGUGGACGAGGUGGCCUACCACGAGAA |
| | | GUACCCCACCAUCUACCACCUGCGGAAGAAGCUGGUGGACUCCAC |
| | | CGACAAGGCCGACCUGCGGCUGAUCUACCUGGCCCUGGCCCACAU |
| | | GAUCAAGUUCCGGGGCCACUUCCUGAUCGAGGGCGACCUGAACCC |
| | | CGACAACUCCGACGUGGACAAGCUGUUCAUCCAGCUGGUGCAGAC |
| | | CUACAACCAGCUGUUCGAGGAGAACCCCAUCAACGCCUCCGGCGU |
| | | GGACGCCAAGGCCAUCCUGUCCGCCCGGCUGUCCAAGUCCCGGCG |
| | | GCUGGAGAACCUGAUCGCCCAGCUGCCCGGCGAGAAGAAGAACGG |
| | | CCUGUUCGGCAACCUGAUCGCCCUGUCCCUGGGCCUGACCCCCAA |
| | | CUUCAAGUCCAACUUCGACCUGGCCGAGGACGCCAAGCUGCAGCU |
| | | GUCCAAGGACACCUACGACGACGACCUGGACAACCUGCUGGCCCA |
| | | GAUCGGCGACCAGUACGCCGACCUGUUCCUGGCCGCCAAGAACCU |
| | | GUCCGACGCCAUCCUGCUGUCCGACAUCCUGCGGGUGAACACCGA |
| | | GAUCACCAAGGCCCCCCUGUCCGCCUCCAUGAUCAAGCGGUACGA |
| | | CGAGCACCACCAGGACCUGACCCUGCUGAAGGCCCUGGUGCGGCA |
| | | GCAGCUGCCCGAGAAGUACAAGGAGAUCUUCUUCGACCAGUCCAA |
| | | GAACGGCUACGCCGGCUACAUCGACGGCGGCGCCUCCCAGGAGGA |
| | | GUUCUACAAGUUCAUCAAGCCCAUCCUGGAGAAGAUGGACGGCA |
| | | CCGAGGAGCUGCUGGUGAAGCUGAACCGGGAGGACCUGCUGCGG |
| | | AAGCAGCGGACCUUCGACAACGGCUCCAUCCCCCACCAGAUCCAC |
| | | CUGGGCGAGCUGCACGCCAUCCUGCGGCGGCAGGAGGACUUCUAC |
| | | CCCUUCCUGAAGGACAACCGGGAGAAGAUCGAGAAGAUCCUGACC |
| | | UUCCGGAUCCCCUACUACGUGGGCCCCCUGGCCCGGGGCAACUCC |
| | | CGGUUCGCCUGGAUGACCCGGAAGUCCGAGGAGACCAUCACCCCC |
| | | UGGAACUUCGAGGAGGUGGUGGACAAGGGCGCCUCCGCCCAGUCC |
| | | UUCAUCGAGCGGAUGACCAACUUCGACAAGAACCUGCCCAACGAG |
| | | AAGGUGCUGCCCAAGCACUCCCUGCUGUACGAGUACUUCACCGUG |
| | | UACAACGAGCUGACCAAGGUGAAGUACGUGACCGAGGGCAUGCG |
| | | GAAGCCCGCCUUCCUGUCCGGCGAGCAGAAGAAGGCCAUCGUGGA |
| | | CCUGCUGUUCAAGACCAACCGGAAGGUGACCGUGAAGCAGCUGA |
| | | AGGAGGACUACUUCAAGAAGAUCGAGUGCUUCGACUCCGUGGAG |
| | | AUCUCCGGCGUGGAGGACCGGUUCAACGCCUCCCUGGGCACCUAC |
| | | CACGACCUGCUGAAGAUCAUCAAGGACAAGGACUUCCUGGACAAC |
| | | GAGGAGAACGAGGACAUCCUGGAGGACAUCGUGCUGACCCUGAC |
| | | CCUGUUCGAGGACCGGGAGAUGAUCGAGGAGCGGCUGAAGACCU |
| | | ACGCCCACCUGUUCGACGACAAGGUGAUGAAGCAGCUGAAGCGGC |
| | | GGCGGUACACCGGCUGGGGCCGGCUGUCCCGGAAGCUGAUCAACG |
| | | GCAUCCGGGACAAGCAGUCCGGCAAGACCAUCCUGGACUUCCUGA |
| | | AGUCCGACGGCUUCGCCAACCGGAACUUCAUGCAGCUGAUCCACG |
| | | ACGACUCCCUGACCUUCAAGGAGGACAUCCAGAAGGCCCAGGUGU |
| | | CCGGCCAGGGCGACUCCCUGCACGAGCACAUCGCCAACCUGGCCG |
| | | GCUCCCCCGCCAUCAAGAAGGGCAUCCUGCAGACCGUGAAGGUGG |
| | | UGGACGAGCUGGUGAAGGUGAUGGGCCGGCACAAGCCCGAGAAC |
| | | AUCGUGAUCGAGAUGGCCCGGGAGAACCAGACCACCCAGAAGGGC |
| | | CAGAAGAACUCCCGGGAGCGGAUGAAGCGGAUCGAGGAGGGCAU |
| | | CAAGGAGCUGGGCUCCCAGAUCCUGAAGGAGCACCCCGUGGAGAA |
| | | CACCCAGCUGCAGAACGAGAAGCUGUACCUGUACUACCUGCAGAA |
| | | CGGCCGGGACAUGUACGUGGACCAGGAGCUGGACAUCAACCGGCU |
| | | GUCCGACUACGACGUGGACCACAUCGUGCCCCAGUCCUUCCUGAA |
| | | GGACGACUCCAUCGACAACAAGGUGCUGACCCGGUCCGACAAGAA |
| | | CCGGGGCAAGUCCGACAACGUGCCCUCCGAGGAGGUGGUGAAGA |
| | | AGAUGAAGAACUACUGGCGGCAGCUGCUGAACGCCAAGCUGAUC |
| | | ACCCAGCGGAAGUUCGACAACCUGACCAAGGCCGAGCGGGGCGGC |
| | | CUGUCCGAGCUGGACAAGGCCGGCUUCAUCAAGCGGCAGCUGGUG |
| | | GAGACCCGGCAGAUCACCAAGCACGUGGCCCAGAUCCUGGACUCC |
| | | CGGAUGAACACCAAGUACGACGAGAACGACAAGCUGAUCCGGGA |
| | | GGUGAAGGUGAUCACCCUGAAGUCCAAGCUGGUGUCCGACUUCC |
| | | GGAAGGACUUCCAGUUCUACAAGGUGCGGGAGAUCAACAACUAC |
| | | CACCACGCCCACGACGCCUACCUGAACGCCGUGGUGGGCACCGCC |
| | | CUGAUCAAGAAGUACCCCAAGCUGGAGUCCGAGUUCGUGUACGG |
| | | CGACUACAAGGUGUACGACGUGCGGAAGAUGAUCGCCAAGUCCG |
| | | AGCAGGAGAUCGGCAAGGCCACCGCCAAGUACUUCUUCUACUCCA |
| | | ACAUCAUGAACUUCUUCAAGACCGAGAUCACCCUGGCCAACGGCG |
| | | AGAUCCGGAAGCGGCCCCUGAUCGAGACCAACGGCGAGACCGGCG |
| | | AGAUCGUGUGGGACAAGGGCCGGGACUUCGCCACCGUGCGGAAG |
| | | GUGCUGUCCAUGCCCCAGGUGAACAUCGUGAAGAAGACCGAGGU |
| | | GCAGACCGGCGGCUUCUCCAAGGAGUCCAUCCUGCCCAAGCGGAA |
| | | CUCCGACAAGCUGAUCGCCCGGAAGAAGGACUGGGACCCCAAGAA |
| | | GUACGGCGGCUUCGACUCCCCCACCGUGGCCUACUCCGUGCUGGU |
| | | GGUGGCCAAGGUGGAGAAGGGCAAGUCCAAGAAGCUGAAGUCCG |
| | | UGAAGGAGCUGCUGGGCAUCACCAUCAUGGAGCGGUCCUCCUUCG |
| | | AGAAGAACCCCAUCGACUUCCUGGAGGCCAAGGGCUACAAGGAG |
| | | GUGAAGAAGGACCUGAUCAUCAAGCUGCCCAAGUACUCCCUGUUC |
| | | GAGCUGGAGAACGGCCGGAAGCGGAUGCUGGCCUCCGCCGGCGAG |
| | | CUGCAGAAGGGCAACGAGCUGGCCCUGCCCUCCAAGUACGUGAAC |
| | | UUCCUGUACCUGGCCUCCCACUACGAGAAGCUGAAGGGCUCCCCC |
| | | GAGGACAACGAGCAGAAGCAGCUGUUCGUGGAGCAGCACAAGCA |
| | | CUACCUGGACGAGAUCAUCGAGCAGAUCUCCGAGUUCUCCAAGCG |
| | | GGUGAUCCUGGCCGACGCCAACCUGGACAAGGUGCUGUCCGCCUA |
| | | CAACAAGCACCGGGACAAGCCCAUCCGGGAGCAGGCCGAGAACAU |
| | | CAUCCACCUGUUCACCCUGACCAACCUGGGCGCCCCCGCCGCCUU |
| | | CAAGUACUUCGACACCACCAUCGACCGGAAGCGGUACACCUCCAC |
| | | CAAGGAGGUGCUGGACGCCACCCUGAUCCACCAGUCCAUCACCGG |
| | | CCUGUACGAGACCCGGAUCGACCUGUCCCAGCUGGGCGGCGACUC |
| | | CGGCGGCUCCGGCGGCUCCGGCGGCUCCACCAACCUGUCCGACAU |
| | | CAUCGAGAAGGAGACCGGCAAGCAGCUGGUGAUCCAGGAGUCCA |
| | | UCCUGAUGCUGCCCGAGGAGGUGGAGGAGGUGAUCGGCAACAAG |
| | | CCCGAGUCCGACAUCCUGGUGCACACCGCCUACGACGAGUCCACC |
| | | GACGAGAACGUGAUGCUGCUGACCUCCGACGCCCCCGAGUACAAG |
| | | CCCUGGGCCCUGGUGAUCCAGGACUCCAACGGCGAGAACAAGAUC |
| | | AAGAUGCUGUCCGGCGGCUCCGGCGGCUCCGGCGGCUCCACCAAC |
| | | CUGUCCGACAUCAUCGAGAAGGAGACCGGCAAGCAGCUGGUGAU |
| | | CCAGGAGUCCAUCCUGAUGCUGCCCGAGGAGGUGGAGGAGGUGA |
| | | UCGGCAACAAGCCCGAGUCCGACAUCCUGGUGCACACCGCCUACG |
| | | ACGAGUCCACCGACGAGAACGUGAUGCUGCUGACCUCCGACGCCC |
| | | CCGAGUACAAGCCCUGGGCCCUGGUGAUCCAGGACUCCAACGGCG |
| | | AGAACAAGAUCAAGAUGCUGUCCGGCGGCUCCAAGCGGACCGCCG |
| | | ACGGCUCCGAGUUCGAGCCCAAGAAGAAGCGGAAGGUGUGAUAG |
| 18 | Amino acid | MEASPASGPRHLMDPHIFTSNFNNGIGRHKTYLCYEVERLDNGTSVKM |
| | sequence for | DQHRGFLHNQAKNLLCGFYGRHAELRFLDLVPSLQLDPAQIYRVTWFI |
| | BC22 with 2x | SWSPCFSWGCAGEVRAFLQENTHVRLRIFAARIYDYDPLYKEALQMLR |
| | UGI | DAGAQVSIMTYDEFKHCWDTFVDHQGCPFQPWDGLDEHSQALSGRL |
| | | RAILQNQGNSGSETPGTSESATPESDKKYSIGLAIGTNSVGWAVITDEY |
| | | KVPSKKFKVLGNTDRHSIKKNLIGALLFDSGETAEATRLKRTARRRYT |
| | | RRKNRICYLQEIFSNEMAKVDDSFFHRLEESFLVEEDKKHERHPIFGNIV |
| | | DEVAYHEKYPTIYHLRKKLVDSTDKADLRLIYLALAHMIKFRGHFLIE |
| | | GDLNPDNSDVDKLFIQLVQTYNQLFEENPINASGVDAKAILSARLSKSR |
| | | RLENLIAQLPGEKKNGLFGNLIALSLGLTPNFKSNFDLAEDAKLQLSKD |
| | | TYDDDLDNLLAQIGDQYADLFLAAKNLSDAILLSDILRVNTEITKAPLS |
| | | ASMIKRYDEHHQDLTLLKALVRQQLPEKYKEIFFDQSKNGYAGYIDGG |
| | | ASQEEFYKFIKPILEKMDGTEELLVKLNREDLLRKQRTFDNGSIPHQIHL |
| | | GELHAILRRQEDFYPFLKDNREKIEKILTFRIPYYVGPLARGNSRFAWM |
| | | TRKSEETITPWNFEEVVDKGASAQSFIERMTNFDKNLPNEKVLPKHSLL |
| | | YEYFTVYNELTKVKYVTEGMRKPAFLSGEQKKAIVDLLFKTNRKVTV |
| | | KQLKEDYFKKIECFDSVEISGVEDRFNASLGTYHDLLKIIKDKDFLDNE |
| | | ENEDILEDIVLTLTLFEDREMIEERLKTYAHLFDDKVMKQLKRRRYTG |
| | | WGRLSRKLINGIRDKQSGKTILDFLKSDGFANRNFMQLIHDDSLTFKED |
| | | IQKAQVSGQGDSLHEHIANLAGSPAIKKGILQTVKVVDELVKVMGRHK |
| | | PENIVIEMARENQTTQKGQKNSRERMKRIEEGIKELGSQILKEHPVENT |
| | | QLQNEKLYLYYLQNGRDMYVDQELDINRLSDYDVDHIVPQSFLKDDSI |
| | | DNKVLTRSDKNRGKSDNVPSEEVVKKMKNYWRQLLNAKLITQRKFD |
| | | NLTKAERGGLSELDKAGFIKRQLVETRQITKHVAQILDSRMNTKYDEN |
| | | DKLIREVKVITLKSKLVSDFRKDFQFYKVREINNYHHAHDAYLNAVVG |
| | | TALIKKYPKLESEFVYGDYKVYDVRKMIAKSEQEIGKATAKYFFYSNI |
| | | MNFFKTEITLANGEIRKRPLIETNGETGEIVWDKGRDFATVRKVLSMPQ |
| | | VNIVKKTEVQTGGFSKESILPKRNSDKLIARKKDWDPKKYGGFDSPTV |
| | | AYSVLVVAKVEKGKSKKLKSVKELLGITIMERSSFEKNPIDFLEAKGYK |
| | | EVKKDLIIKLPKYSLFELENGRKRMLASAGELQKGNELALPSKYVNFL |
| | | YLASHYEKLKGSPEDNEQKQLFVEQHKHYLDEIIEQISEFSKRVILADA |
| | | NLDKVLSAYNKHRDKPIREQAENIIHLFTLTNLGAPAAFKYFDTTIDRK |
| | | RYTSTKEVLDATLIHQSITGLYETRIDLSQLGGDSGGSGGSGGSTNLSDI |
| | | IEKETGKQLVIQESILMLPEEVEEVIGNKPESDILVHTAYDESTDENVML |
| | | LTSDAPEYKPWALVIQDSNGENKIKMLSGGSGGSGGSTNLSDIIEKETG |
| | | KQLVIQESILMLPEEVEEVIGNKPESDILVHTAYDESTDENVMLLTSDA |
| | | PEYKPWALVIQDSNGENKIKMLSGGSKRTADGSEFEPKKKRKV |
| 19 | mRNA encoding | GGGAAGCUCAGAAUAAACGCUCAACUUUGGCCGGAUCUGCCACCA |
| | BE4MAX protein | UGAAGCGGACCGCCGACGGCUCCGAGUUCGAGUCCCCCAAGAAGA |
| | | AGCGGAAGGUGUCCUCCGAGACCGGCCCCGUGGCCGUGGACCCCA |
| | | CCCUGCGGCGGCGGAUCGAGCCCCACGAGUUCGAGGUGUUCUUCG |
| | | ACCCCCGGGAGCUGCGGAAGGAGACCUGCCUGCUGUACGAGAUCA |
| | | ACUGGGGCGGCCGGCACUCCAUCUGGCGGCACACCUCCCAGAACA |
| | | CCAACAAGCACGUGGAGGUGAACUUCAUCGAGAAGUUCACCACCG |
| | | AGCGGUACUUCUGCCCCAACACCCGGUGCUCCAUCACCUGGUUCC |
| | | UGUCCUGGUCCCCCUGCGGCGAGUGCUCCCGGGCCAUCACCGAGU |
| | | UCCUGUCCCGGUACCCCCACGUGACCCUGUUCAUCUACAUCGCCC |
| | | GGCUGUACCACCACGCCGACCCCCGGAACCGGCAGGGCCUGCGGG |
| | | ACCUGAUCUCCUCCGGCGUGACCAUCCAGAUCAUGACCGAGCAGG |
| | | AGUCCGGCUACUGCUGGCGGAACUUCGUGAACUACUCCCCCUCCA |
| | | ACGAGGCCCACUGGCCCCGGUACCCCCACCUGUGGGUGCGGCUGU |
| | | ACGUGCUGGAGCUGUACUGCAUCAUCCUGGGCCUGCCCCCCUGCC |
| | | UGAACAUCCUGCGGCGGAAGCAGCCCCAGCUGACCUUCUUCACCA |
| | | UCGCCCUGCAGUCCUGCCACUACCAGCGGCUGCCCCCCCACAUCC |
| | | UGUGGGCCACCGGCCUGAAGUCCGGCGGCUCCUCCGGCGGCUCCU |
| | | CCGGCUCCGAGACCCCCGGCACCUCCGAGUCCGCCACCCCCGAGU |
| | | CCUCCGGCGGCUCCUCCGGCGGCUCCGACAAGAAGUACUCCAUCG |
| | | GCCUGGCCAUCGGCACCAACUCCGUGGGCUGGGCCGUGAUCACCG |
| | | ACGAGUACAAGGUGCCCUCCAAGAAGUUCAAGGUGCUGGGCAAC |
| | | ACCGACCGGCACUCCAUCAAGAAGAACCUGAUCGGCGCCCUGCUG |
| | | UUCGACUCCGGCGAGACCGCCGAGGCCACCCGGCUGAAGCGGACC |
| | | GCCCGGCGGCGGUACACCCGGCGGAAGAACCGGAUCUGCUACCUG |
| | | CAGGAGAUCUUCUCCAACGAGAUGGCCAAGGUGGACGACUCCUUC |
| | | UUCCACCGGCUGGAGGAGUCCUUCCUGGUGGAGGAGGACAAGAA |
| | | GCACGAGCGGCACCCCAUCUUCGGCAACAUCGUGGACGAGGUGGC |
| | | CUACCACGAGAAGUACCCCACCAUCUACCACCUGCGGAAGAAGCU |
| | | GGUGGACUCCACCGACAAGGCCGACCUGCGGCUGAUCUACCUGGC |
| | | CCUGGCCCACAUGAUCAAGUUCCGGGGCCACUUCCUGAUCGAGGG |
| | | CGACCUGAACCCCGACAACUCCGACGUGGACAAGCUGUUCAUCCA |
| | | GCUGGUGCAGACCUACAACCAGCUGUUCGAGGAGAACCCCAUCAA |
| | | CGCCUCCGGCGUGGACGCCAAGGCCAUCCUGUCCGCCCGGCUGUC |
| | | CAAGUCCCGGCGGCUGGAGAACCUGAUCGCCCAGCUGCCCGGCGA |
| | | GAAGAAGAACGGCCUGUUCGGCAACCUGAUCGCCCUGUCCCUGGG |
| | | CCUGACCCCCAACUUCAAGUCCAACUUCGACCUGGCCGAGGACGC |
| | | CAAGCUGCAGCUGUCCAAGGACACCUACGACGACGACCUGGACAA |
| | | CCUGCUGGCCCAGAUCGGCGACCAGUACGCCGACCUGUUCCUGGC |
| | | CGCCAAGAACCUGUCCGACGCCAUCCUGCUGUCCGACAUCCUGCG |
| | | GGUGAACACCGAGAUCACCAAGGCCCCCCUGUCCGCCUCCAUGAU |
| | | CAAGCGGUACGACGAGCACCACCAGGACCUGACCCUGCUGAAGGC |
| | | CCUGGUGCGGCAGCAGCUGCCCGAGAAGUACAAGGAGAUCUUCU |
| | | UCGACCAGUCCAAGAACGGCUACGCCGGCUACAUCGACGGCGGCG |
| | | CCUCCCAGGAGGAGUUCUACAAGUUCAUCAAGCCCAUCCUGGAGA |
| | | AGAUGGACGGCACCGAGGAGCUGCUGGUGAAGCUGAACCGGGAG |
| | | GACCUGCUGCGGAAGCAGCGGACCUUCGACAACGGCUCCAUCCCC |
| | | CACCAGAUCCACCUGGGCGAGCUGCACGCCAUCCUGCGGCGGCAG |
| | | GAGGACUUCUACCCCUUCCUGAAGGACAACCGGGAGAAGAUCGA |
| | | GAAGAUCCUGACCUUCCGGAUCCCCUACUACGUGGGCCCCCUGGC |
| | | CCGGGGCAACUCCCGGUUCGCCUGGAUGACCCGGAAGUCCGAGGA |
| | | GACCAUCACCCCCUGGAACUUCGAGGAGGUGGUGGACAAGGGCGC |
| | | CUCCGCCCAGUCCUUCAUCGAGCGGAUGACCAACUUCGACAAGAA |
| | | CCUGCCCAACGAGAAGGUGCUGCCCAAGCACUCCCUGCUGUACGA |
| | | GUACUUCACCGUGUACAACGAGCUGACCAAGGUGAAGUACGUGA |
| | | CCGAGGGCAUGCGGAAGCCCGCCUUCCUGUCCGGCGAGCAGAAGA |
| | | AGGCCAUCGUGGACCUGCUGUUCAAGACCAACCGGAAGGUGACCG |
| | | UGAAGCAGCUGAAGGAGGACUACUUCAAGAAGAUCGAGUGCUUC |
| | | GACUCCGUGGAGAUCUCCGGCGUGGAGGACCGGUUCAACGCCUCC |
| | | CUGGGCACCUACCACGACCUGCUGAAGAUCAUCAAGGACAAGGAC |
| | | UUCCUGGACAACGAGGAGAACGAGGACAUCCUGGAGGACAUCGU |
| | | GCUGACCCUGACCCUGUUCGAGGACCGGGAGAUGAUCGAGGAGC |
| | | GGCUGAAGACCUACGCCCACCUGUUCGACGACAAGGUGAUGAAGC |
| | | AGCUGAAGCGGCGGCGGUACACCGGCUGGGGCCGGCUGUCCCGGA |
| | | AGCUGAUCAACGGCAUCCGGGACAAGCAGUCCGGCAAGACCAUCC |
| | | UGGACUUCCUGAAGUCCGACGGCUUCGCCAACCGGAACUUCAUGC |
| | | AGCUGAUCCACGACGACUCCCUGACCUUCAAGGAGGACAUCCAGA |
| | | AGGCCCAGGUGUCCGGCCAGGGCGACUCCCUGCACGAGCACAUCG |
| | | CCAACCUGGCCGGCUCCCCCGCCAUCAAGAAGGGCAUCCUGCAGA |
| | | CCGUGAAGGUGGUGGACGAGCUGGUGAAGGUGAUGGGCCGGCAC |
| | | AAGCCCGAGAACAUCGUGAUCGAGAUGGCCCGGGAGAACCAGACC |
| | | ACCCAGAAGGGCCAGAAGAACUCCCGGGAGCGGAUGAAGCGGAU |
| | | CGAGGAGGGCAUCAAGGAGCUGGGCUCCCAGAUCCUGAAGGAGC |
| | | ACCCCGUGGAGAACACCCAGCUGCAGAACGAGAAGCUGUACCUGU |
| | | ACUACCUGCAGAACGGCCGGGACAUGUACGUGGACCAGGAGCUG |
| | | GACAUCAACCGGCUGUCCGACUACGACGUGGACCACAUCGUGCCC |
| | | CAGUCCUUCCUGAAGGACGACUCCAUCGACAACAAGGUGCUGACC |
| | | CGGUCCGACAAGAACCGGGGCAAGUCCGACAACGUGCCCUCCGAG |
| | | GAGGUGGUGAAGAAGAUGAAGAACUACUGGCGGCAGCUGCUGAA |
| | | CGCCAAGCUGAUCACCCAGCGGAAGUUCGACAACCUGACCAAGGC |
| | | CGAGCGGGGCGGCCUGUCCGAGCUGGACAAGGCCGGCUUCAUCAA |
| | | GCGGCAGCUGGUGGAGACCCGGCAGAUCACCAAGCACGUGGCCCA |
| | | GAUCCUGGACUCCCGGAUGAACACCAAGUACGACGAGAACGACAA |
| | | GCUGAUCCGGGAGGUGAAGGUGAUCACCCUGAAGUCCAAGCUGG |
| | | UGUCCGACUUCCGGAAGGACUUCCAGUUCUACAAGGUGCGGGAG |
| | | AUCAACAACUACCACCACGCCCACGACGCCUACCUGAACGCCGUG |
| | | GUGGGCACCGCCCUGAUCAAGAAGUACCCCAAGCUGGAGUCCGAG |
| | | UUCGUGUACGGCGACUACAAGGUGUACGACGUGCGGAAGAUGAU |
| | | CGCCAAGUCCGAGCAGGAGAUCGGCAAGGCCACCGCCAAGUACUU |
| | | CUUCUACUCCAACAUCAUGAACUUCUUCAAGACCGAGAUCACCCU |
| | | GGCCAACGGCGAGAUCCGGAAGCGGCCCCUGAUCGAGACCAACGG |
| | | CGAGACCGGCGAGAUCGUGUGGGACAAGGGCCGGGACUUCGCCAC |
| | | CGUGCGGAAGGUGCUGUCCAUGCCCCAGGUGAACAUCGUGAAGA |
| | | AGACCGAGGUGCAGACCGGCGGCUUCUCCAAGGAGUCCAUCCUGC |
| | | CCAAGCGGAACUCCGACAAGCUGAUCGCCCGGAAGAAGGACUGGG |
| | | ACCCCAAGAAGUACGGCGGCUUCGACUCCCCCACCGUGGCCUACU |
| | | CCGUGCUGGUGGUGGCCAAGGUGGAGAAGGGCAAGUCCAAGAAG |
| | | CUGAAGUCCGUGAAGGAGCUGCUGGGCAUCACCAUCAUGGAGCG |
| | | GUCCUCCUUCGAGAAGAACCCCAUCGACUUCCUGGAGGCCAAGGG |
| | | CUACAAGGAGGUGAAGAAGGACCUGAUCAUCAAGCUGCCCAAGU |
| | | ACUCCCUGUUCGAGCUGGAGAACGGCCGGAAGCGGAUGCUGGCCU |
| | | CCGCCGGCGAGCUGCAGAAGGGCAACGAGCUGGCCCUGCCCUCCA |
| | | AGUACGUGAACUUCCUGUACCUGGCCUCCCACUACGAGAAGCUGA |
| | | AGGGCUCCCCCGAGGACAACGAGCAGAAGCAGCUGUUCGUGGAGC |
| | | AGCACAAGCACUACCUGGACGAGAUCAUCGAGCAGAUCUCCGAGU |
| | | UCUCCAAGCGGGUGAUCCUGGCCGACGCCAACCUGGACAAGGUGC |
| | | UGUCCGCCUACAACAAGCACCGGGACAAGCCCAUCCGGGAGCAGG |
| | | CCGAGAACAUCAUCCACCUGUUCACCCUGACCAACCUGGGCGCCC |
| | | CCGCCGCCUUCAAGUACUUCGACACCACCAUCGACCGGAAGCGGU |
| | | ACACCUCCACCAAGGAGGUGCUGGACGCCACCCUGAUCCACCAGU |
| | | CCAUCACCGGCCUGUACGAGACCCGGAUCGACCUGUCCCAGCUGG |
| | | GCGGCGACUCCGGCGGCUCCGGCGGCUCCGGCGGCUCCACCAACC |
| | | UGUCCGACAUCAUCGAGAAGGAGACCGGCAAGCAGCUGGUGAUC |
| | | CAGGAGUCCAUCCUGAUGCUGCCCGAGGAGGUGGAGGAGGUGAU |
| | | CGGCAACAAGCCCGAGUCCGACAUCCUGGUGCACACCGCCUACGA |
| | | CGAGUCCACCGACGAGAACGUGAUGCUGCUGACCUCCGACGCCCC |
| | | CGAGUACAAGCCCUGGGCCCUGGUGAUCCAGGACUCCAACGGCGA |
| | | GAACAAGAUCAAGAUGCUGUCCGGCGGCUCCGGCGGCUCCGGCGG |
| | | CUCCACCAACCUGUCCGACAUCAUCGAGAAGGAGACCGGCAAGCA |
| | | GCUGGUGAUCCAGGAGUCCAUCCUGAUGCUGCCCGAGGAGGUGG |
| | | AGGAGGUGAUCGGCAACAAGCCCGAGUCCGACAUCCUGGUGCACA |
| | | CCGCCUACGACGAGUCCACCGACGAGAACGUGAUGCUGCUGACCU |
| | | CCGACGCCCCCGAGUACAAGCCCUGGGCCCUGGUGAUCCAGGACU |
| | | CCAACGGCGAGAACAAGAUCAAGAUGCUGUCCGGCGGCUCCAAGC |
| | | GGACCGCCGACGGCUCCGAGUUCGAGCCCAAGAAGAAGCGGAAGG |
| | | UGUGAUAGCUAGCACCAGCCUCAAGAACACCCGAAUGGAGUCUCU |
| | | AAGCUACAUAAUACCAACUUACACUUUACAAAAUGUUGUCCCCCA |
| | | AAAUGUAGCCAUUCGUAUCUGCUCCUAAUAAAAAGAAAGUUUCU |
| | | UCACAUUCUCUCGAGAAAAAAAAAAAAUGGAAAAAAAAAAAACG |
| | | GAAAAAAAAAAAAGGUAAAAAAAAAAAAUAUAAAAAAAAAAAAC |
| | | AUAAAAAAAAAAAACGAAAAAAAAAAAACGUAAAAAAAAAAAAC |
| | | UCAAAAAAAAAAAAGAUAAAAAAAAAAAACCUAAAAAAAAAAAA |
| | | UGUAAAAAAAAAAAAGGGAAAAAAAAAAAACGCAAAAAAAAAAA |
| | | ACACAAAAAAAAAAAAUGCAAAAAAAAAAAAUCGAAAAAAAAAA |
| | | AAUCUAAAAAAAAAAAACGAAAAAAAAAAAACCCAAAAAAAAAA |
| | | AAGACAAAAAAAAAAAAUAGAAAAAAAAAAAAGUUAAAAAAAAA |
| | | AAACUGAAAAAAAAAAAAUUUAAAAAAAAAAAAUCUAG |
| 20 | Open reading | AUGAAGCGGACCGCCGACGGCUCCGAGUUCGAGUCCCCCAAGAAG |
| | frame for | AAGCGGAAGGUGUCCUCCGAGACCGGCCCCGUGGCCGUGGACCCC |
| | BE4MAX protein | ACCCUGCGGCGGCGGAUCGAGCCCCACGAGUUCGAGGUGUUCUUC |
| | | GACCCCCGGGAGCUGCGGAAGGAGACCUGCCUGCUGUACGAGAUC |
| | | AACUGGGGCGGCCGGCACUCCAUCUGGCGGCACACCUCCCAGAAC |
| | | ACCAACAAGCACGUGGAGGUGAACUUCAUCGAGAAGUUCACCACC |
| | | GAGCGGUACUUCUGCCCCAACACCCGGUGCUCCAUCACCUGGUUC |
| | | CUGUCCUGGUCCCCCUGCGGCGAGUGCUCCCGGGCCAUCACCGAG |
| | | UUCCUGUCCCGGUACCCCCACGUGACCCUGUUCAUCUACAUCGCC |
| | | CGGCUGUACCACCACGCCGACCCCCGGAACCGGCAGGGCCUGCGG |
| | | GACCUGAUCUCCUCCGGCGUGACCAUCCAGAUCAUGACCGAGCAG |
| | | GAGUCCGGCUACUGCUGGCGGAACUUCGUGAACUACUCCCCCUCC |
| | | AACGAGGCCCACUGGCCCCGGUACCCCCACCUGUGGGUGCGGCUG |
| | | UACGUGCUGGAGCUGUACUGCAUCAUCCUGGGCCUGCCCCCCUGC |
| | | CUGAACAUCCUGCGGCGGAAGCAGCCCCAGCUGACCUUCUUCACC |
| | | AUCGCCCUGCAGUCCUGCCACUACCAGCGGCUGCCCCCCCACAUC |
| | | CUGUGGGCCACCGGCCUGAAGUCCGGCGGCUCCUCCGGCGGCUCC |
| | | UCCGGCUCCGAGACCCCCGGCACCUCCGAGUCCGCCACCCCCGAG |
| | | UCCUCCGGCGGCUCCUCCGGCGGCUCCGACAAGAAGUACUCCAUC |
| | | GGCCUGGCCAUCGGCACCAACUCCGUGGGCUGGGCCGUGAUCACC |
| | | GACGAGUACAAGGUGCCCUCCAAGAAGUUCAAGGUGCUGGGCAA |
| | | CACCGACCGGCACUCCAUCAAGAAGAACCUGAUCGGCGCCCUGCU |
| | | GUUCGACUCCGGCGAGACCGCCGAGGCCACCCGGCUGAAGCGGAC |
| | | CGCCCGGCGGCGGUACACCCGGCGGAAGAACCGGAUCUGCUACCU |
| | | GCAGGAGAUCUUCUCCAACGAGAUGGCCAAGGUGGACGACUCCU |
| | | UCUUCCACCGGCUGGAGGAGUCCUUCCUGGUGGAGGAGGACAAG |
| | | AAGCACGAGCGGCACCCCAUCUUCGGCAACAUCGUGGACGAGGUG |
| | | GCCUACCACGAGAAGUACCCCACCAUCUACCACCUGCGGAAGAAG |
| | | CUGGUGGACUCCACCGACAAGGCCGACCUGCGGCUGAUCUACCUG |
| | | GCCCUGGCCCACAUGAUCAAGUUCCGGGGCCACUUCCUGAUCGAG |
| | | GGCGACCUGAACCCCGACAACUCCGACGUGGACAAGCUGUUCAUC |
| | | CAGCUGGUGCAGACCUACAACCAGCUGUUCGAGGAGAACCCCAUC |
| | | AACGCCUCCGGCGUGGACGCCAAGGCCAUCCUGUCCGCCCGGCUG |
| | | UCCAAGUCCCGGCGGCUGGAGAACCUGAUCGCCCAGCUGCCCGGC |
| | | GAGAAGAAGAACGGCCUGUUCGGCAACCUGAUCGCCCUGUCCCUG |
| | | GGCCUGACCCCCAACUUCAAGUCCAACUUCGACCUGGCCGAGGAC |
| | | GCCAAGCUGCAGCUGUCCAAGGACACCUACGACGACGACCUGGAC |
| | | AACCUGCUGGCCCAGAUCGGCGACCAGUACGCCGACCUGUUCCUG |
| | | GCCGCCAAGAACCUGUCCGACGCCAUCCUGCUGUCCGACAUCCUG |
| | | CGGGUGAACACCGAGAUCACCAAGGCCCCCCUGUCCGCCUCCAUG |
| | | AUCAAGCGGUACGACGAGCACCACCAGGACCUGACCCUGCUGAAG |
| | | GCCCUGGUGCGGCAGCAGCUGCCCGAGAAGUACAAGGAGAUCUUC |
| | | UUCGACCAGUCCAAGAACGGCUACGCCGGCUACAUCGACGGCGGC |
| | | GCCUCCCAGGAGGAGUUCUACAAGUUCAUCAAGCCCAUCCUGGAG |
| | | AAGAUGGACGGCACCGAGGAGCUGCUGGUGAAGCUGAACCGGGA |
| | | GGACCUGCUGCGGAAGCAGCGGACCUUCGACAACGGCUCCAUCCC |
| | | CCACCAGAUCCACCUGGGCGAGCUGCACGCCAUCCUGCGGCGGCA |
| | | GGAGGACUUCUACCCCUUCCUGAAGGACAACCGGGAGAAGAUCG |
| | | AGAAGAUCCUGACCUUCCGGAUCCCCUACUACGUGGGCCCCCUGG |
| | | CCCGGGGCAACUCCCGGUUCGCCUGGAUGACCCGGAAGUCCGAGG |
| | | AGACCAUCACCCCCUGGAACUUCGAGGAGGUGGUGGACAAGGGC |
| | | GCCUCCGCCCAGUCCUUCAUCGAGCGGAUGACCAACUUCGACAAG |
| | | AACCUGCCCAACGAGAAGGUGCUGCCCAAGCACUCCCUGCUGUAC |
| | | GAGUACUUCACCGUGUACAACGAGCUGACCAAGGUGAAGUACGU |
| | | GACCGAGGGCAUGCGGAAGCCCGCCUUCCUGUCCGGCGAGCAGAA |
| | | GAAGGCCAUCGUGGACCUGCUGUUCAAGACCAACCGGAAGGUGA |
| | | CCGUGAAGCAGCUGAAGGAGGACUACUUCAAGAAGAUCGAGUGC |
| | | UUCGACUCCGUGGAGAUCUCCGGCGUGGAGGACCGGUUCAACGCC |
| | | UCCCUGGGCACCUACCACGACCUGCUGAAGAUCAUCAAGGACAAG |
| | | GACUUCCUGGACAACGAGGAGAACGAGGACAUCCUGGAGGACAU |
| | | CGUGCUGACCCUGACCCUGUUCGAGGACCGGGAGAUGAUCGAGG |
| | | AGCGGCUGAAGACCUACGCCCACCUGUUCGACGACAAGGUGAUGA |
| | | AGCAGCUGAAGCGGCGGCGGUACACCGGCUGGGGCCGGCUGUCCC |
| | | GGAAGCUGAUCAACGGCAUCCGGGACAAGCAGUCCGGCAAGACCA |
| | | UCCUGGACUUCCUGAAGUCCGACGGCUUCGCCAACCGGAACUUCA |
| | | UGCAGCUGAUCCACGACGACUCCCUGACCUUCAAGGAGGACAUCC |
| | | AGAAGGCCCAGGUGUCCGGCCAGGGCGACUCCCUGCACGAGCACA |
| | | UCGCCAACCUGGCCGGCUCCCCCGCCAUCAAGAAGGGCAUCCUGC |
| | | AGACCGUGAAGGUGGUGGACGAGCUGGUGAAGGUGAUGGGCCGG |
| | | CACAAGCCCGAGAACAUCGUGAUCGAGAUGGCCCGGGAGAACCAG |
| | | ACCACCCAGAAGGGCCAGAAGAACUCCCGGGAGCGGAUGAAGCGG |
| | | AUCGAGGAGGGCAUCAAGGAGCUGGGCUCCCAGAUCCUGAAGGA |
| | | GCACCCCGUGGAGAACACCCAGCUGCAGAACGAGAAGCUGUACCU |
| | | GUACUACCUGCAGAACGGCCGGGACAUGUACGUGGACCAGGAGC |
| | | UGGACAUCAACCGGCUGUCCGACUACGACGUGGACCACAUCGUGC |
| | | CCCAGUCCUUCCUGAAGGACGACUCCAUCGACAACAAGGUGCUGA |
| | | CCCGGUCCGACAAGAACCGGGGCAAGUCCGACAACGUGCCCUCCG |
| | | AGGAGGUGGUGAAGAAGAUGAAGAACUACUGGCGGCAGCUGCUG |
| | | AACGCCAAGCUGAUCACCCAGCGGAAGUUCGACAACCUGACCAAG |
| | | GCCGAGCGGGGCGGCCUGUCCGAGCUGGACAAGGCCGGCUUCAUC |
| | | AAGCGGCAGCUGGUGGAGACCCGGCAGAUCACCAAGCACGUGGCC |
| | | CAGAUCCUGGACUCCCGGAUGAACACCAAGUACGACGAGAACGAC |
| | | AAGCUGAUCCGGGAGGUGAAGGUGAUCACCCUGAAGUCCAAGCU |
| | | GGUGUCCGACUUCCGGAAGGACUUCCAGUUCUACAAGGUGCGGG |
| | | AGAUCAACAACUACCACCACGCCCACGACGCCUACCUGAACGCCG |
| | | UGGUGGGCACCGCCCUGAUCAAGAAGUACCCCAAGCUGGAGUCCG |
| | | AGUUCGUGUACGGCGACUACAAGGUGUACGACGUGCGGAAGAUG |
| | | AUCGCCAAGUCCGAGCAGGAGAUCGGCAAGGCCACCGCCAAGUAC |
| | | UUCUUCUACUCCAACAUCAUGAACUUCUUCAAGACCGAGAUCACC |
| | | CUGGCCAACGGCGAGAUCCGGAAGCGGCCCCUGAUCGAGACCAAC |
| | | GGCGAGACCGGCGAGAUCGUGUGGGACAAGGGCCGGGACUUCGC |
| | | CACCGUGCGGAAGGUGCUGUCCAUGCCCCAGGUGAACAUCGUGAA |
| | | GAAGACCGAGGUGCAGACCGGCGGCUUCUCCAAGGAGUCCAUCCU |
| | | GCCCAAGCGGAACUCCGACAAGCUGAUCGCCCGGAAGAAGGACUG |
| | | GGACCCCAAGAAGUACGGCGGCUUCGACUCCCCCACCGUGGCCUA |
| | | CUCCGUGCUGGUGGUGGCCAAGGUGGAGAAGGGCAAGUCCAAGA |
| | | AGCUGAAGUCCGUGAAGGAGCUGCUGGGCAUCACCAUCAUGGAG |
| | | CGGUCCUCCUUCGAGAAGAACCCCAUCGACUUCCUGGAGGCCAAG |
| | | GGCUACAAGGAGGUGAAGAAGGACCUGAUCAUCAAGCUGCCCAA |
| | | GUACUCCCUGUUCGAGCUGGAGAACGGCCGGAAGCGGAUGCUGG |
| | | CCUCCGCCGGCGAGCUGCAGAAGGGCAACGAGCUGGCCCUGCCCU |
| | | CCAAGUACGUGAACUUCCUGUACCUGGCCUCCCACUACGAGAAGC |
| | | UGAAGGGCUCCCCCGAGGACAACGAGCAGAAGCAGCUGUUCGUG |
| | | GAGCAGCACAAGCACUACCUGGACGAGAUCAUCGAGCAGAUCUCC |
| | | GAGUUCUCCAAGCGGGUGAUCCUGGCCGACGCCAACCUGGACAAG |
| | | GUGCUGUCCGCCUACAACAAGCACCGGGACAAGCCCAUCCGGGAG |
| | | CAGGCCGAGAACAUCAUCCACCUGUUCACCCUGACCAACCUGGGC |
| | | GCCCCCGCCGCCUUCAAGUACUUCGACACCACCAUCGACCGGAAG |
| | | CGGUACACCUCCACCAAGGAGGUGCUGGACGCCACCCUGAUCCAC |
| | | CAGUCCAUCACCGGCCUGUACGAGACCCGGAUCGACCUGUCCCAG |
| | | CUGGGCGGCGACUCCGGCGGCUCCGGCGGCUCCGGCGGCUCCACC |
| | | AACCUGUCCGACAUCAUCGAGAAGGAGACCGGCAAGCAGCUGGU |
| | | GAUCCAGGAGUCCAUCCUGAUGCUGCCCGAGGAGGUGGAGGAGG |
| | | UGAUCGGCAACAAGCCCGAGUCCGACAUCCUGGUGCACACCGCCU |
| | | ACGACGAGUCCACCGACGAGAACGUGAUGCUGCUGACCUCCGACG |
| | | CCCCCGAGUACAAGCCCUGGGCCCUGGUGAUCCAGGACUCCAACG |
| | | GCGAGAACAAGAUCAAGAUGCUGUCCGGCGGCUCCGGCGGCUCCG |
| | | GCGGCUCCACCAACCUGUCCGACAUCAUCGAGAAGGAGACCGGCA |
| | | AGCAGCUGGUGAUCCAGGAGUCCAUCCUGAUGCUGCCCGAGGAG |
| | | GUGGAGGAGGUGAUCGGCAACAAGCCCGAGUCCGACAUCCUGGU |
| | | GCACACCGCCUACGACGAGUCCACCGACGAGAACGUGAUGCUGCU |
| | | GACCUCCGACGCCCCCGAGUACAAGCCCUGGGCCCUGGUGAUCCA |
| | | GGACUCCAACGGCGAGAACAAGAUCAAGAUGCUGUCCGGCGGCUC |
| | | CAAGCGGACCGCCGACGGCUCCGAGUUCGAGCCCAAGAAGAAGCG |
| | | GAAGGUGUGAUAG |
| 21 | Amino acid | MKRTADGSEFESPKKKRKVSSETGPVAVDPTLRRRIEPHEFEVFFDPRE |
| | sequence for | LRKETCLLYEINWGGRHSIWRHTSQNTNKHVEVNFIEKFTTERYFCPNT |
| | BE4MAX protein | RCSITWFLSWSPCGECSRAITEFLSRYPHVTLFIYIARLYHHADPRNRQG |
| | | LRDLISSGVTIQIMTEQESGYCWRNFVNYSPSNEAHWPRYPHLWVRLY |
| | | VLELYCIILGLPPCLNILRRKQPQLTFFTIALQSCHYQRLPPHILWATGLK |
| | | SGGSSGGSSGSETPGTSESATPESSGGSSGGSDKKYSIGLAIGTNSVGW |
| | | AVITDEYKVPSKKFKVLGNTDRHSIKKNLIGALLFDSGETAEATRLKRT |
| | | ARRRYTRRKNRICYLQEIFSNEMAKVDDSFFHRLEESFLVEEDKKHER |
| | | HPIFGNIVDEVAYHEKYPTIYHLRKKLVDSTDKADLRLIYLALAHMIKF |
| | | RGHFLIEGDLNPDNSDVDKLFIQLVQTYNQLFEENPINASGVDAKAILS |
| | | ARLSKSRRLENLIAQLPGEKKNGLFGNLIALSLGLTPNFKSNFDLAEDA |
| | | KLQLSKDTYDDDLDNLLAQIGDQYADLFLAAKNLSDAILLSDILRVNT |
| | | EITKAPLSASMIKRYDEHHQDLTLLKALVRQQLPEKYKEIFFDQSKNGY |
| | | AGYIDGGASQEEFYKFIKPILEKMDGTEELLVKLNREDLLRKQRTFDN |
| | | GSIPHQIHLGELHAILRRQEDFYPFLKDNREKIEKILTFRIPYYVGPLARG |
| | | NSRFAWMTRKSEETITPWNFEEVVDKGASAQSFIERMTNFDKNLPNEK |
| | | VLPKHSLLYEYFTVYNELTKVKYVTEGMRKPAFLSGEQKKAIVDLLFK |
| | | TNRKVTVKQLKEDYFKKIECFDSVEISGVEDRFNASLGTYHDLLKIIKD |
| | | KDFLDNEENEDILEDIVLTLTLFEDREMIEERLKTYAHLFDDKVMKQL |
| | | KRRRYTGWGRLSRKLINGIRDKQSGKTILDFLKSDGFANRNFMQLIHD |
| | | DSLTFKEDIQKAQVSGQGDSLHEHIANLAGSPAIKKGILQTVKVVDELV |
| | | KVMGRHKPENIVIEMARENQTTQKGQKNSRERMKRIEEGIKELGSQIL |
| | | KEHPVENTQLQNEKLYLYYLQNGRDMYVDQELDINRLSDYDVDHIVP |
| | | QSFLKDDSIDNKVLTRSDKNRGKSDNVPSEEVVKKMKNYWRQLLNA |
| | | KLITQRKFDNLTKAERGGLSELDKAGFIKRQLVETRQITKHVAQILDSR |
| | | MNTKYDENDKLIREVKVITLKSKLVSDFRKDFQFYKVREINNYHHAHD |
| | | AYLNAVVGTALIKKYPKLESEFVYGDYKVYDVRKMIAKSEQEIGKAT |
| | | AKYFFYSNIMNFFKTEITLANGEIRKRPLIETNGETGEIVWDKGRDFAT |
| | | VRKVLSMPQVNIVKKTEVQTGGFSKESILPKRNSDKLIARKKDWDPKK |
| | | YGGFDSPTVAYSVLVVAKVEKGKSKKLKSVKELLGITIMERSSFEKNPI |
| | | DFLEAKGYKEVKKDLIIKLPKYSLFELENGRKRMLASAGELQKGNELA |
| | | LPSKYVNFLYLASHYEKLKGSPEDNEQKQLFVEQHKHYLDEIIEQISEF |
| | | SKRVILADANLDKVLSAYNKHRDKPIREQAENIIHLFTLTNLGAPAAFK |
| | | YFDTTIDRKRYTSTKEVLDATLIHQSITGLYETRIDLSQLGGDSGGSGGS |
| | | GGSTNLSDIIEKETGKQLVIQESILMLPEEVEEVIGNKPESDILVHTAYDE |
| | | STDENVMLLTSDAPEYKPWALVIQDSNGENKIKMLSGGSGGSGGSTNL |
| | | SDIIEKETGKQLVIQESILMLPEEVEEVIGNKPESDILVHTAYDESTDENV |
| | | MLLTSDAPEYKPWALVIQDSNGENKIKMLSGGSKRTADGSEFEPKKKR |
| | | KV** |
| 22 | Amino acid | MEASPASGPRHLMDPHIFTSNFNNGIGRHKTYLCYEVERLDNGTSVKM |
| | sequence of H. | DQHRGFLHNQAKNLLCGFYGRHAELRFLDLVPSLQLDPAQIYRVTWFI |
| | sapiens | SWSPCFSWGCAGEVRAFLQENTHVRLRIFAARIYDYDPLYKEALQMLR |
| | APOBEC3A | DAGAQVSIMTYDEFKHCWDTFVDHQGCPFQPWDGLDEHSQALSGRL |
| | deaminase (A3A), | RAILQNQGN |
| | see BC22 | |
| 23 | | NOT USED |
| 24 | exemplary UGI | TNLSDIIEKETGKQLVIQESILMLPEEVEEVIGNKPESDILVHTAYDESTD |
| | | ENVMLLTSDAPEYKPWALVIQDSNGENKIKML |
| 25 | exemplary XTEN | SGSETPGTSESATPES |
| 26 | exemplary XTEN | SGSETPGTSESA |
| 27 | exemplary XTEN | SGSETPGTSESATPEGGSGGS |
| 28 | amino acid | GGGGSEAAAKEAAAK |
| | sequence for | |
| | exemplary linker | |
| 29 | amino acid | EAAAKGGGGSGGGGS |
| | sequence for | |
| | exemplary linker | |
| 30 | amino acid | EAAAKEAAAKEAAAK |
| | sequence for | |
| | exemplary linker | |
| 31 | amino acid | GGGGSGGGGSGGGGSGGGGS |
| | sequence for | |
| | exemplary linker | |
| 32 | amino acid | GGGGSGGGGSEAAAKEAAAK |
| | sequence for | |
| | exemplary linker | |
| 33 | amino acid | GGGGSEAAAKGGGGSGGGGS |
| | sequence for | |
| | exemplary linker | |
| 34 | amino acid | EAAAKEAAAKEAAAKGGGGSGGGGS |
| | sequence for | |
| | exemplary linker | |
| 35 | amino acid | EAAAKEAAAKEAAAKEAAAK |
| | sequence for | |
| | exemplary linker | |
| 36 | amino acid | GGGGSEAAAKEAAAKGGGGSEAAAK |
| | sequence for | |
| | exemplary linker | |
| 37 | amino acid | EAAAKEAAAKGGGGSGGGGSGGGGS |
| | sequence for | |
| | exemplary linker | |
| 38 | amino acid | EAAAKEAAAKGGGGSGGGGSEAAAK |
| | sequence for | |
| | exemplary linker | |
| 39 | amino acid | SGGS |
| | sequence for | |
| | exemplary linker | |
| | SGGS | |
| 40 | amino acid acid | PKKKRKV |
| | sequence for | |
| | SV40 NLS | |
| 41 | Amino acid | MDKKYSIGLAIGTNSVGWAVITDEYKVPSKKFKVLGNTDRHSIKKNLI |
| | sequence of Cas9 | GALLFDSGETAEATRLKRTARRRYTRRKNRICYLQEIFSNEMAKVDDS |
| | nickase (D10A) | FFHRLEESFLVEEDKKHERHPIFGNIVDEVAYHEKYPTIYHLRKKLVDS |
| | with 1x NLS as | TDKADLRLIYLALAHMIKFRGHFLIEGDLNPDNSDVDKLFIQLVQTYN |
| | thc C-terminal 7 | QLFEENPINASGVDAKAILSARLSKSRRLENLIAQLPGEKKNGLFGNLIA |
| | amino acids | LSLGLTPNFKSNFDLAEDAKLQLSKDTYDDDLDNLLAQIGDQYADLFL |
| | | AAKNLSDAILLSDILRVNTEITKAPLSASMIKRYDEHHQDLTLLKALVR |
| | | QQLPEKYKEIFFDQSKNGYAGYIDGGASQEEFYKFIKPILEKMDGTEEL |
| | | LVKLNREDLLRKQRTFDNGSIPHQIHLGELHAILRRQEDFYPFLKDNRE |
| | | KIEKILTFRIPYYVGPLARGNSRFAWMTRKSEETITPWNFEEVVDKGAS |
| | | AQSFIERMTNFDKNLPNEKVLPKHSLLYEYFTVYNELTKVKYVTEGMR |
| | | KPAFLSGEQKKAIVDLLFKTNRKVTVKQLKEDYFKKIECFDSVEISGVE |
| | | DRFNASLGTYHDLLKIIKDKDFLDNEENEDILEDIVLTLTLFEDREMIEE |
| | | RLKTYAHLFDDKVMKQLKRRRYTGWGRLSRKLINGIRDKQSGKTILD |
| | | FLKSDGFANRNFMQLIHDDSLTFKEDIQKAQVSGQGDSLHEHIANLAG |
| | | SPAIKKGILQTVKVVDELVKVMGRHKPENIVIEMARENQTTQKGQKNS |
| | | RERMKRIEEGIKELGSQILKEHPVENTQLQNEKLYLYYLQNGRDMYVD |
| | | QELDINRLSDYDVDHIVPQSFLKDDSIDNKVLTRSDKNRGKSDNVPSEE |
| | | VVKKMKNYWRQLLNAKLITQRKFDNLTKAERGGLSELDKAGFIKRQL |
| | | VETRQITKHVAQILDSRMNTKYDENDKLIREVKVITLKSKLVSDFRKDF |
| | | QFYKVREINNYHHAHDAYLNAVVGTALIKKYPKLESEFVYGDYKVYD |
| | | VRKMIAKSEQEIGKATAKYFFYSNIMNFFKTEITLANGEIRKRPLIETNG |
| | | ETGEIVWDKGRDFATVRKVLSMPQVNIVKKTEVQTGGFSKESILPKRN |
| | | SDKLIARKKDWDPKKYGGFDSPTVAYSVLVVAKVEKGKSKKLKSVKE |
| | | LLGITIMERSSFEKNPIDFLEAKGYKEVKKDLIIKLPKYSLFELENGRKR |
| | | MLASAGELQKGNELALPSKYVNFLYLASHYEKLKGSPEDNEQKQLFV |
| | | EQHKHYLDEIIEQISEFSKRVILADANLDKVLSAYNKHRDKPIREQAENI |
| | | IHLFTLTNLGAPAAFKYFDTTIDRKRYTSTKEVLDATLIHQSITGLYETR |
| | | IDLSQLGGDGGGSPKKKRKV |
| 42 | Cas9 nickase | GACAAGAAGUACAGCAUCGGACUGGCAAUCGGAACAAACAGCGU |
| | (D10A) mRNA | CGGAUGGGCAGUCAUCACAGACGAAUACAAGGUCCCGAGCAAGA |
| | coding sequence | AGUUCAAGGUCCUGGGAAACACAGACAGACACAGCAUCAAGAAG |
| | using minimal | AACCUGAUCGGAGCACUGCUGUUCGACAGCGGAGAAACAGCAGA |
| | uridine codons as | AGCAACAAGACUGAAGAGAACAGCAAGAAGAAGAUACACAAGAA |
| | listed in Table 3 | GAAAGAACAGAAUCUGCUACCUGCAGGAAAUCUUCAGCAACGAA |
| | (no start or stop | AUGGCAAAGGUCGACGACAGCUUCUUCCACAGACUGGAAGAAAG |
| | codons; suitable | CUUCCUGGUCGAAGAAGACAAGAAGCACGAAAGACACCCGAUCU |
| | for inclusion in | UCGGAAACAUCGUCGACGAAGUCGCAUACCACGAAAAGUACCCGA |
| | fusion protein | CAAUCUACCACCUGAGAAAGAAGCUGGUCGACAGCACAGACAAG |
| | coding sequence) | GCAGACCUGAGACUGAUCUACCUGGCACUGGCACACAUGAUCAAG |
| | | UUCAGAGGACACUUCCUGAUCGAAGGAGACCUGAACCCGGACAAC |
| | | AGCGACGUCGACAAGCUGUUCAUCCAGCUGGUCCAGACAUACAAC |
| | | CAGCUGUUCGAAGAAAACCCGAUCAACGCAAGCGGAGUCGACGCA |
| | | AAGGCAAUCCUGAGCGCAAGACUGAGCAAGAGCAGAAGACUGGA |
| | | AAACCUGAUCGCACAGCUGCCGGGAGAAAAGAAGAACGGACUGU |
| | | UCGGAAACCUGAUCGCACUGAGCCUGGGACUGACACCGAACUUCA |
| | | AGAGCAACUUCGACCUGGCAGAAGACGCAAAGCUGCAGCUGAGC |
| | | AAGGACACAUACGACGACGACCUGGACAACCUGCUGGCACAGAUC |
| | | GGAGACCAGUACGCAGACCUGUUCCUGGCAGCAAAGAACCUGAGC |
| | | GACGCAAUCCUGCUGAGCGACAUCCUGAGAGUCAACACAGAAAUC |
| | | ACAAAGGCACCGCUGAGCGCAAGCAUGAUCAAGAGAUACGACGA |
| | | ACACCACCAGGACCUGACACUGCUGAAGGCACUGGUCAGACAGCA |
| | | GCUGCCGGAAAAGUACAAGGAAAUCUUCUUCGACCAGAGCAAGA |
| | | ACGGAUACGCAGGAUACAUCGACGGAGGAGCAAGCCAGGAAGAA |
| | | UUCUACAAGUUCAUCAAGCCGAUCCUGGAAAAGAUGGACGGAAC |
| | | AGAAGAACUGCUGGUCAAGCUGAACAGAGAAGACCUGCUGAGAA |
| | | AGCAGAGAACAUUCGACAACGGAAGCAUCCCGCACCAGAUCCACC |
| | | UGGGAGAACUGCACGCAAUCCUGAGAAGACAGGAAGACUUCUAC |
| | | CCGUUCCUGAAGGACAACAGAGAAAAGAUCGAAAAGAUCCUGAC |
| | | AUUCAGAAUCCCGUACUACGUCGGACCGCUGGCAAGAGGAAACA |
| | | GCAGAUUCGCAUGGAUGACAAGAAAGAGCGAAGAAACAAUCACA |
| | | CCGUGGAACUUCGAAGAAGUCGUCGACAAGGGAGCAAGCGCACA |
| | | GAGCUUCAUCGAAAGAAUGACAAACUUCGACAAGAACCUGCCGA |
| | | ACGAAAAGGUCCUGCCGAAGCACAGCCUGCUGUACGAAUACUUCA |
| | | CAGUCUACAACGAACUGACAAAGGUCAAGUACGUCACAGAAGGA |
| | | AUGAGAAAGCCGGCAUUCCUGAGCGGAGAACAGAAGAAGGCAAU |
| | | CGUCGACCUGCUGUUCAAGACAAACAGAAAGGUCACAGUCAAGC |
| | | AGCUGAAGGAAGACUACUUCAAGAAGAUCGAAUGCUUCGACAGC |
| | | GUCGAAAUCAGCGGAGUCGAAGACAGAUUCAACGCAAGCCUGGG |
| | | AACAUACCACGACCUGCUGAAGAUCAUCAAGGACAAGGACUUCCU |
| | | GGACAACGAAGAAAACGAAGACAUCCUGGAAGACAUCGUCCUGA |
| | | CACUGACACUGUUCGAAGACAGAGAAAUGAUCGAAGAAAGACUG |
| | | AAGACAUACGCACACCUGUUCGACGACAAGGUCAUGAAGCAGCU |
| | | GAAGAGAAGAAGAUACACAGGAUGGGGAAGACUGAGCAGAAAGC |
| | | UGAUCAACGGAAUCAGAGACAAGCAGAGCGGAAAGACAAUCCUG |
| | | GACUUCCUGAAGAGCGACGGAUUCGCAAACAGAAACUUCAUGCA |
| | | GCUGAUCCACGACGACAGCCUGACAUUCAAGGAAGACAUCCAGAA |
| | | GGCACAGGUCAGCGGACAGGGAGACAGCCUGCACGAACACAUCGC |
| | | AAACCUGGCAGGAAGCCCGGCAAUCAAGAAGGGAAUCCUGCAGA |
| | | CAGUCAAGGUCGUCGACGAACUGGUCAAGGUCAUGGGAAGACAC |
| | | AAGCCGGAAAACAUCGUCAUCGAAAUGGCAAGAGAAAACCAGAC |
| | | AACACAGAAGGGACAGAAGAACAGCAGAGAAAGAAUGAAGAGAA |
| | | UCGAAGAAGGAAUCAAGGAACUGGGAAGCCAGAUCCUGAAGGAA |
| | | CACCCGGUCGAAAACACACAGCUGCAGAACGAAAAGCUGUACCUG |
| | | UACUACCUGCAGAACGGAAGAGACAUGUACGUCGACCAGGAACU |
| | | GGACAUCAACAGACUGAGCGACUACGACGUCGACCACAUCGUCCC |
| | | GCAGAGCUUCCUGAAGGACGACAGCAUCGACAACAAGGUCCUGAC |
| | | AAGAAGCGACAAGAACAGAGGAAAGAGCGACAACGUCCCGAGCG |
| | | AAGAAGUCGUCAAGAAGAUGAAGAACUACUGGAGACAGCUGCUG |
| | | AACGCAAAGCUGAUCACACAGAGAAAGUUCGACAACCUGACAAA |
| | | GGCAGAGAGAGGAGGACUGAGCGAACUGGACAAGGCAGGAUUCA |
| | | UCAAGAGACAGCUGGUCGAAACAAGACAGAUCACAAAGCACGUC |
| | | GCACAGAUCCUGGACAGCAGAAUGAACACAAAGUACGACGAAAA |
| | | CGACAAGCUGAUCAGAGAAGUCAAGGUCAUCACACUGAAGAGCA |
| | | AGCUGGUCAGCGACUUCAGAAAGGACUUCCAGUUCUACAAGGUC |
| | | AGAGAAAUCAACAACUACCACCACGCACACGACGCAUACCUGAAC |
| | | GCAGUCGUCGGAACAGCACUGAUCAAGAAGUACCCGAAGCUGGA |
| | | AAGCGAAUUCGUCUACGGAGACUACAAGGUCUACGACGUCAGAA |
| | | AGAUGAUCGCAAAGAGCGAACAGGAAAUCGGAAAGGCAACAGCA |
| | | AAGUACUUCUUCUACAGCAACAUCAUGAACUUCUUCAAGACAGA |
| | | AAUCACACUGGCAAACGGAGAAAUCAGAAAGAGACCGCUGAUCG |
| | | AAACAAACGGAGAAACAGGAGAAAUCGUCUGGGACAAGGGAAGA |
| | | GACUUCGCAACAGUCAGAAAGGUCCUGAGCAUGCCGCAGGUCAAC |
| | | AUCGUCAAGAAGACAGAAGUCCAGACAGGAGGAUUCAGCAAGGA |
| | | AAGCAUCCUGCCGAAGAGAAACAGCGACAAGCUGAUCGCAAGAA |
| | | AGAAGGACUGGGACCCGAAGAAGUACGGAGGAUUCGACAGCCCG |
| | | ACAGUCGCAUACAGCGUCCUGGUCGUCGCAAAGGUCGAAAAGGG |
| | | AAAGAGCAAGAAGCUGAAGAGCGUCAAGGAACUGCUGGGAAUCA |
| | | CAAUCAUGGAAAGAAGCAGCUUCGAAAAGAACCCGAUCGACUUC |
| | | CUGGAAGCAAAGGGAUACAAGGAAGUCAAGAAGGACCUGAUCAU |
| | | CAAGCUGCCGAAGUACAGCCUGUUCGAACUGGAAAACGGAAGAA |
| | | AGAGAAUGCUGGCAAGCGCAGGAGAACUGCAGAAGGGAAACGAA |
| | | CUGGCACUGCCGAGCAAGUACGUCAACUUCCUGUACCUGGCAAGC |
| | | CACUACGAAAAGCUGAAGGGAAGCCCGGAAGACAACGAACAGAA |
| | | GCAGCUGUUCGUCGAACAGCACAAGCACUACCUGGACGAAAUCAU |
| | | CGAACAGAUCAGCGAAUUCAGCAAGAGAGUCAUCCUGGCAGACG |
| | | CAAACCUGGACAAGGUCCUGAGCGCAUACAACAAGCACAGAGACA |
| | | AGCCGAUCAGAGAACAGGCAGAAAACAUCAUCCACCUGUUCACAC |
| | | UGACAAACCUGGGAGCACCGGCAGCAUUCAAGUACUUCGACACAA |
| | | CAAUCGACAGAAAGAGAUACACAAGCACAAAGGAAGUCCUGGAC |
| | | GCAACACUGAUCCACCAGAGCAUCACAGGACUGUACGAAACAAGA |
| | | AUCGACCUGAGCCAGCUGGGAGGAGACGGAGGAGGAAGCCCGAA |
| | | GAAGAAGAGAAAGGUC |
| 43 | Amino acid | MDKKYSIGLAIGTNSVGWAVITDEYKVPSKKFKVLGNTDRHSIKKNLI |
| | sequence of Cas9 | GALLFDSGETAEATRLKRTARRRYTRRKNRICYLQEIFSNEMAKVDDS |
| | nickase (without | FFHRLEESFLVEEDKKHERHPIFGNIVDEVAYHEKYPTIYHLRKKLVDS |
| | NLS) | TDKADLRLIYLALAHMIKFRGHFLIEGDLNPDNSDVDKLFIQLVQTYN |
| | | QLFEENPINASGVDAKAILSARLSKSRRLENLIAQLPGEKKNGLFGNLIA |
| | | LSLGLTPNFKSNFDLAEDAKLQLSKDTYDDDLDNLLAQIGDQYADLFL |
| | | AAKNLSDAILLSDILRVNTEITKAPLSASMIKRYDEHHQDLTLLKALVR |
| | | QQLPEKYKEIFFDQSKNGYAGYIDGGASQEEFYKFIKPILEKMDGTEEL |
| | | LVKLNREDLLRKQRTFDNGSIPHQIHLGELHAILRRQEDFYPFLKDNRE |
| | | KIEKILTFRIPYYVGPLARGNSRFAWMTRKSEETITPWNFEEVVDKGAS |
| | | AQSFIERMTNFDKNLPNEKVLPKHSLLYEYFTVYNELTKVKYVTEGMR |
| | | KPAFLSGEQKKAIVDLLFKTNRKVTVKQLKEDYFKKIECFDSVEISGVE |
| | | DRFNASLGTYHDLLKIIKDKDFLDNEENEDILEDIVLTLTLFEDREMIEE |
| | | RLKTYAHLFDDKVMKQLKRRRYTGWGRLSRKLINGIRDKQSGKTILD |
| | | FLKSDGFANRNFMQLIHDDSLTFKEDIQKAQVSGQGDSLHEHIANLAG |
| | | SPAIKKGILQTVKVVDELVKVMGRHKPENIVIEMARENQTTQKGQKNS |
| | | RERMKRIEEGIKELGSQILKEHPVENTQLQNEKLYLYYLQNGRDMYVD |
| | | QELDINRLSDYDVDHIVPQSFLKDDSIDNKVLTRSDKNRGKSDNVPSEE |
| | | VVKKMKNYWRQLLNAKLITQRKFDNLTKAERGGLSELDKAGFIKRQL |
| | | VETRQITKHVAQILDSRMNTKYDENDKLIREVKVITLKSKLVSDFRKDF |
| | | QFYKVREINNYHHAHDAYLNAVVGTALIKKYPKLESEFVYGDYKVYD |
| | | VRKMIAKSEQEIGKATAKYFFYSNIMNFFKTEITLANGEIRKRPLIETNG |
| | | ETGEIVWDKGRDFATVRKVLSMPQVNIVKKTEVQTGGFSKESILPKRN |
| | | SDKLIARKKDWDPKKYGGFDSPTVAYSVLVVAKVEKGKSKKLKSVKE |
| | | LLGITIMERSSFEKNPIDFLEAKGYKEVKKDLIIKLPKYSLFELENGRKR |
| | | MLASAGELQKGNELALPSKYVNFLYLASHYEKLKGSPEDNEQKQLFV |
| | | EQHKHYLDEIIEQISEFSKRVILADANLDKVLSAYNKHRDKPIREQAENI |
| | | IHLFTLTNLGAPAAFKYFDTTIDRKRYTSTKEVLDATLIHQSITGLYETR |
| | | IDLSQLGGD |
| 44 | Cas9 nickase | GACAAGAAGUACAGCAUCGGACUGGCAAUCGGAACAAACAGCGU |
| | coding sequence | CGGAUGGGCAGUCAUCACAGACGAAUACAAGGUCCCGAGCAAGA |
| | encoding SEQ ID | AGUUCAAGGUCCUGGGAAACACAGACAGACACAGCAUCAAGAAG |
| | NO: 43 using | AACCUGAUCGGAGCACUGCUGUUCGACAGCGGAGAAACAGCAGA |
| | minimal uridine | AGCAACAAGACUGAAGAGAACAGCAAGAAGAAGAUACACAAGAA |
| | codons as listed | GAAAGAACAGAAUCUGCUACCUGCAGGAAAUCUUCAGCAACGAA |
| | in Table 3 (no | AUGGCAAAGGUCGACGACAGCUUCUUCCACAGACUGGAAGAAAG |
| | start or stop | CUUCCUGGUCGAAGAAGACAAGAAGCACGAAAGACACCCGAUCU |
| | codons; suitable | UCGGAAACAUCGUCGACGAAGUCGCAUACCACGAAAAGUACCCGA |
| | for inclusion in | CAAUCUACCACCUGAGAAAGAAGCUGGUCGACAGCACAGACAAG |
| | fusion protein | GCAGACCUGAGACUGAUCUACCUGGCACUGGCACACAUGAUCAAG |
| | coding sequence) | UUCAGAGGACACUUCCUGAUCGAAGGAGACCUGAACCCGGACAAC |
| | | AGCGACGUCGACAAGCUGUUCAUCCAGCUGGUCCAGACAUACAAC |
| | | CAGCUGUUCGAAGAAAACCCGAUCAACGCAAGCGGAGUCGACGCA |
| | | AAGGCAAUCCUGAGCGCAAGACUGAGCAAGAGCAGAAGACUGGA |
| | | AAACCUGAUCGCACAGCUGCCGGGAGAAAAGAAGAACGGACUGU |
| | | UCGGAAACCUGAUCGCACUGAGCCUGGGACUGACACCGAACUUCA |
| | | AGAGCAACUUCGACCUGGCAGAAGACGCAAAGCUGCAGCUGAGC |
| | | AAGGACACAUACGACGACGACCUGGACAACCUGCUGGCACAGAUC |
| | | GGAGACCAGUACGCAGACCUGUUCCUGGCAGCAAAGAACCUGAGC |
| | | GACGCAAUCCUGCUGAGCGACAUCCUGAGAGUCAACACAGAAAUC |
| | | ACAAAGGCACCGCUGAGCGCAAGCAUGAUCAAGAGAUACGACGA |
| | | ACACCACCAGGACCUGACACUGCUGAAGGCACUGGUCAGACAGCA |
| | | GCUGCCGGAAAAGUACAAGGAAAUCUUCUUCGACCAGAGCAAGA |
| | | ACGGAUACGCAGGAUACAUCGACGGAGGAGCAAGCCAGGAAGAA |
| | | UUCUACAAGUUCAUCAAGCCGAUCCUGGAAAAGAUGGACGGAAC |
| | | AGAAGAACUGCUGGUCAAGCUGAACAGAGAAGACCUGCUGAGAA |
| | | AGCAGAGAACAUUCGACAACGGAAGCAUCCCGCACCAGAUCCACC |
| | | UGGGAGAACUGCACGCAAUCCUGAGAAGACAGGAAGACUUCUAC |
| | | CCGUUCCUGAAGGACAACAGAGAAAAGAUCGAAAAGAUCCUGAC |
| | | AUUCAGAAUCCCGUACUACGUCGGACCGCUGGCAAGAGGAAACA |
| | | GCAGAUUCGCAUGGAUGACAAGAAAGAGCGAAGAAACAAUCACA |
| | | CCGUGGAACUUCGAAGAAGUCGUCGACAAGGGAGCAAGCGCACA |
| | | GAGCUUCAUCGAAAGAAUGACAAACUUCGACAAGAACCUGCCGA |
| | | ACGAAAAGGUCCUGCCGAAGCACAGCCUGCUGUACGAAUACUUCA |
| | | CAGUCUACAACGAACUGACAAAGGUCAAGUACGUCACAGAAGGA |
| | | AUGAGAAAGCCGGCAUUCCUGAGCGGAGAACAGAAGAAGGCAAU |
| | | CGUCGACCUGCUGUUCAAGACAAACAGAAAGGUCACAGUCAAGC |
| | | AGCUGAAGGAAGACUACUUCAAGAAGAUCGAAUGCUUCGACAGC |
| | | GUCGAAAUCAGCGGAGUCGAAGACAGAUUCAACGCAAGCCUGGG |
| | | AACAUACCACGACCUGCUGAAGAUCAUCAAGGACAAGGACUUCCU |
| | | GGACAACGAAGAAAACGAAGACAUCCUGGAAGACAUCGUCCUGA |
| | | CACUGACACUGUUCGAAGACAGAGAAAUGAUCGAAGAAAGACUG |
| | | AAGACAUACGCACACCUGUUCGACGACAAGGUCAUGAAGCAGCU |
| | | GAAGAGAAGAAGAUACACAGGAUGGGGAAGACUGAGCAGAAAGC |
| | | UGAUCAACGGAAUCAGAGACAAGCAGAGCGGAAAGACAAUCCUG |
| | | GACUUCCUGAAGAGCGACGGAUUCGCAAACAGAAACUUCAUGCA |
| | | GCUGAUCCACGACGACAGCCUGACAUUCAAGGAAGACAUCCAGAA |
| | | GGCACAGGUCAGCGGACAGGGAGACAGCCUGCACGAACACAUCGC |
| | | AAACCUGGCAGGAAGCCCGGCAAUCAAGAAGGGAAUCCUGCAGA |
| | | CAGUCAAGGUCGUCGACGAACUGGUCAAGGUCAUGGGAAGACAC |
| | | AAGCCGGAAAACAUCGUCAUCGAAAUGGCAAGAGAAAACCAGAC |
| | | AACACAGAAGGGACAGAAGAACAGCAGAGAAAGAAUGAAGAGAA |
| | | UCGAAGAAGGAAUCAAGGAACUGGGAAGCCAGAUCCUGAAGGAA |
| | | CACCCGGUCGAAAACACACAGCUGCAGAACGAAAAGCUGUACCUG |
| | | UACUACCUGCAGAACGGAAGAGACAUGUACGUCGACCAGGAACU |
| | | GGACAUCAACAGACUGAGCGACUACGACGUCGACCACAUCGUCCC |
| | | GCAGAGCUUCCUGAAGGACGACAGCAUCGACAACAAGGUCCUGAC |
| | | AAGAAGCGACAAGAACAGAGGAAAGAGCGACAACGUCCCGAGCG |
| | | AAGAAGUCGUCAAGAAGAUGAAGAACUACUGGAGACAGCUGCUG |
| | | AACGCAAAGCUGAUCACACAGAGAAAGUUCGACAACCUGACAAA |
| | | GGCAGAGAGAGGAGGACUGAGCGAACUGGACAAGGCAGGAUUCA |
| | | UCAAGAGACAGCUGGUCGAAACAAGACAGAUCACAAAGCACGUC |
| | | GCACAGAUCCUGGACAGCAGAAUGAACACAAAGUACGACGAAAA |
| | | CGACAAGCUGAUCAGAGAAGUCAAGGUCAUCACACUGAAGAGCA |
| | | AGCUGGUCAGCGACUUCAGAAAGGACUUCCAGUUCUACAAGGUC |
| | | AGAGAAAUCAACAACUACCACCACGCACACGACGCAUACCUGAAC |
| | | GCAGUCGUCGGAACAGCACUGAUCAAGAAGUACCCGAAGCUGGA |
| | | AAGCGAAUUCGUCUACGGAGACUACAAGGUCUACGACGUCAGAA |
| | | AGAUGAUCGCAAAGAGCGAACAGGAAAUCGGAAAGGCAACAGCA |
| | | AAGUACUUCUUCUACAGCAACAUCAUGAACUUCUUCAAGACAGA |
| | | AAUCACACUGGCAAACGGAGAAAUCAGAAAGAGACCGCUGAUCG |
| | | AAACAAACGGAGAAACAGGAGAAAUCGUCUGGGACAAGGGAAGA |
| | | GACUUCGCAACAGUCAGAAAGGUCCUGAGCAUGCCGCAGGUCAAC |
| | | AUCGUCAAGAAGACAGAAGUCCAGACAGGAGGAUUCAGCAAGGA |
| | | AAGCAUCCUGCCGAAGAGAAACAGCGACAAGCUGAUCGCAAGAA |
| | | AGAAGGACUGGGACCCGAAGAAGUACGGAGGAUUCGACAGCCCG |
| | | ACAGUCGCAUACAGCGUCCUGGUCGUCGCAAAGGUCGAAAAGGG |
| | | AAAGAGCAAGAAGCUGAAGAGCGUCAAGGAACUGCUGGGAAUCA |
| | | CAAUCAUGGAAAGAAGCAGCUUCGAAAAGAACCCGAUCGACUUC |
| | | CUGGAAGCAAAGGGAUACAAGGAAGUCAAGAAGGACCUGAUCAU |
| | | CAAGCUGCCGAAGUACAGCCUGUUCGAACUGGAAAACGGAAGAA |
| | | AGAGAAUGCUGGCAAGCGCAGGAGAACUGCAGAAGGGAAACGAA |
| | | CUGGCACUGCCGAGCAAGUACGUCAACUUCCUGUACCUGGCAAGC |
| | | CACUACGAAAAGCUGAAGGGAAGCCCGGAAGACAACGAACAGAA |
| | | GCAGCUGUUCGUCGAACAGCACAAGCACUACCUGGACGAAAUCAU |
| | | CGAACAGAUCAGCGAAUUCAGCAAGAGAGUCAUCCUGGCAGACG |
| | | CAAACCUGGACAAGGUCCUGAGCGCAUACAACAAGCACAGAGACA |
| | | AGCCGAUCAGAGAACAGGCAGAAAACAUCAUCCACCUGUUCACAC |
| | | UGACAAACCUGGGAGCACCGGCAGCAUUCAAGUACUUCGACACAA |
| | | CAAUCGACAGAAAGAGAUACACAAGCACAAAGGAAGUCCUGGAC |
| | | GCAACACUGAUCCACCAGAGCAUCACAGGACUGUACGAAACAAGA |
| | | AUCGACCUGAGCCAGCUGGGAGGAGAC |
| 45 | Amino acid | DKKYSIGLAIGTNSVGWAVITDEYKVPSKKFKVLGNTDRHSIKKNLIG |
| | sequence of Cas9 | ALLFDSGETAEATRLKRTARRRYTRRKNRICYLQEIFSNEMAKVDDSFF |
| | nickase with two | HRLEESFLVEEDKKHERHPIFGNIVDEVAYHEKYPTIYHLRKKLVDSTD |
| | nuclear | KADLRLIYLALAHMIKFRGHFLIEGDLNPDNSDVDKLFIQLVQTYNQLF |
| | localization | EENPINASGVDAKAILSARLSKSRRLENLIAQLPGEKKNGLFGNLIALSL |
| | signals as thc C- | GLTPNFKSNFDLAEDAKLQLSKDTYDDDLDNLLAQIGDQYADLFLAA |
| | terminal amino | KNLSDAILLSDILRVNTEITKAPLSASMIKRYDEHHQDLTLLKALVRQQ |
| | acids | LPEKYKEIFFDQSKNGYAGYIDGGASQEEFYKFIKPILEKMDGTEELLV |
| | | KLNREDLLRKQRTFDNGSIPHQIHLGELHAILRRQEDFYPFLKDNREKIE |
| | | KILTFRIPYYVGPLARGNSRFAWMTRKSEETITPWNFEEVVDKGASAQ |
| | | SFIERMTNFDKNLPNEKVLPKHSLLYEYFTVYNELTKVKYVTEGMRKP |
| | | AFLSGEQKKAIVDLLFKTNRKVTVKQLKEDYFKKIECFDSVEISGVEDR |
| | | FNASLGTYHDLLKIIKDKDFLDNEENEDILEDIVLTLTLFEDREMIEERL |
| | | KTYAHLFDDKVMKQLKRRRYTGWGRLSRKLINGIRDKQSGKTILDFL |
| | | KSDGFANRNFMQLIHDDSLTFKEDIQKAQVSGQGDSLHEHIANLAGSP |
| | | AIKKGILQTVKVVDELVKVMGRHKPENIVIEMARENQTTQKGQKNSR |
| | | ERMKRIEEGIKELGSQILKEHPVENTQLQNEKLYLYYLQNGRDMYVDQ |
| | | ELDINRLSDYDVDHIVPQSFLKDDSIDNKVLTRSDKNRGKSDNVPSEEV |
| | | VKKMKNYWRQLLNAKLITQRKFDNLTKAERGGLSELDKAGFIKRQLV |
| | | ETRQITKHVAQILDSRMNTKYDENDKLIREVKVITLKSKLVSDFRKDFQ |
| | | FYKVREINNYHHAHDAYLNAVVGTALIKKYPKLESEFVYGDYKVYDV |
| | | RKMIAKSEQEIGKATAKYFFYSNIMNFFKTEITLANGEIRKRPLIETNGE |
| | | TGEIVWDKGRDFATVRKVLSMPQVNIVKKTEVQTGGFSKESILPKRNS |
| | | DKLIARKKDWDPKKYGGFDSPTVAYSVLVVAKVEKGKSKKLKSVKEL |
| | | LGITIMERSSFEKNPIDFLEAKGYKEVKKDLIIKLPKYSLFELENGRKRM |
| | | LASAGELQKGNELALPSKYVNFLYLASHYEKLKGSPEDNEQKQLFVEQ |
| | | HKHYLDEIIEQISEFSKRVILADANLDKVLSAYNKHRDKPIREQAENIIH |
| | | LFTLTNLGAPAAFKYFDTTIDRKRYTSTKEVLDATLIHQSITGLYETRID |
| | | LSQLGGDGSGSPKKKRKVDGSPKKKRKVDSG |
| 46 | Cas9 nickase | GACAAGAAGUACAGCAUCGGACUGGCAAUCGGAACAAACAGCGU |
| | coding sequence | CGGAUGGGCAGUCAUCACAGACGAAUACAAGGUCCCGAGCAAGA |
| | encoding SEQ ID | AGUUCAAGGUCCUGGGAAACACAGACAGACACAGCAUCAAGAAG |
| | NO: 45 using | AACCUGAUCGGAGCACUGCUGUUCGACAGCGGAGAAACAGCAGA |
| | minimal uridine | AGCAACAAGACUGAAGAGAACAGCAAGAAGAAGAUACACAAGAA |
| | codons as listed | GAAAGAACAGAAUCUGCUACCUGCAGGAAAUCUUCAGCAACGAA |
| | in Table 3 (no | AUGGCAAAGGUCGACGACAGCUUCUUCCACAGACUGGAAGAAAG |
| | start or stop | CUUCCUGGUCGAAGAAGACAAGAAGCACGAAAGACACCCGAUCU |
| | codons; suitable | UCGGAAACAUCGUCGACGAAGUCGCAUACCACGAAAAGUACCCGA |
| | for inclusion in | CAAUCUACCACCUGAGAAAGAAGCUGGUCGACAGCACAGACAAG |
| | fusion protein | GCAGACCUGAGACUGAUCUACCUGGCACUGGCACACAUGAUCAAG |
| | coding sequence) | UUCAGAGGACACUUCCUGAUCGAAGGAGACCUGAACCCGGACAAC |
| | | AGCGACGUCGACAAGCUGUUCAUCCAGCUGGUCCAGACAUACAAC |
| | | CAGCUGUUCGAAGAAAACCCGAUCAACGCAAGCGGAGUCGACGCA |
| | | AAGGCAAUCCUGAGCGCAAGACUGAGCAAGAGCAGAAGACUGGA |
| | | AAACCUGAUCGCACAGCUGCCGGGAGAAAAGAAGAACGGACUGU |
| | | UCGGAAACCUGAUCGCACUGAGCCUGGGACUGACACCGAACUUCA |
| | | AGAGCAACUUCGACCUGGCAGAAGACGCAAAGCUGCAGCUGAGC |
| | | AAGGACACAUACGACGACGACCUGGACAACCUGCUGGCACAGAUC |
| | | GGAGACCAGUACGCAGACCUGUUCCUGGCAGCAAAGAACCUGAGC |
| | | GACGCAAUCCUGCUGAGCGACAUCCUGAGAGUCAACACAGAAAUC |
| | | ACAAAGGCACCGCUGAGCGCAAGCAUGAUCAAGAGAUACGACGA |
| | | ACACCACCAGGACCUGACACUGCUGAAGGCACUGGUCAGACAGCA |
| | | GCUGCCGGAAAAGUACAAGGAAAUCUUCUUCGACCAGAGCAAGA |
| | | ACGGAUACGCAGGAUACAUCGACGGAGGAGCAAGCCAGGAAGAA |
| | | UUCUACAAGUUCAUCAAGCCGAUCCUGGAAAAGAUGGACGGAAC |
| | | AGAAGAACUGCUGGUCAAGCUGAACAGAGAAGACCUGCUGAGAA |
| | | AGCAGAGAACAUUCGACAACGGAAGCAUCCCGCACCAGAUCCACC |
| | | UGGGAGAACUGCACGCAAUCCUGAGAAGACAGGAAGACUUCUAC |
| | | CCGUUCCUGAAGGACAACAGAGAAAAGAUCGAAAAGAUCCUGAC |
| | | AUUCAGAAUCCCGUACUACGUCGGACCGCUGGCAAGAGGAAACA |
| | | GCAGAUUCGCAUGGAUGACAAGAAAGAGCGAAGAAACAAUCACA |
| | | CCGUGGAACUUCGAAGAAGUCGUCGACAAGGGAGCAAGCGCACA |
| | | GAGCUUCAUCGAAAGAAUGACAAACUUCGACAAGAACCUGCCGA |
| | | ACGAAAAGGUCCUGCCGAAGCACAGCCUGCUGUACGAAUACUUCA |
| | | CAGUCUACAACGAACUGACAAAGGUCAAGUACGUCACAGAAGGA |
| | | AUGAGAAAGCCGGCAUUCCUGAGCGGAGAACAGAAGAAGGCAAU |
| | | CGUCGACCUGCUGUUCAAGACAAACAGAAAGGUCACAGUCAAGC |
| | | AGCUGAAGGAAGACUACUUCAAGAAGAUCGAAUGCUUCGACAGC |
| | | GUCGAAAUCAGCGGAGUCGAAGACAGAUUCAACGCAAGCCUGGG |
| | | AACAUACCACGACCUGCUGAAGAUCAUCAAGGACAAGGACUUCCU |
| | | GGACAACGAAGAAAACGAAGACAUCCUGGAAGACAUCGUCCUGA |
| | | CACUGACACUGUUCGAAGACAGAGAAAUGAUCGAAGAAAGACUG |
| | | AAGACAUACGCACACCUGUUCGACGACAAGGUCAUGAAGCAGCU |
| | | GAAGAGAAGAAGAUACACAGGAUGGGGAAGACUGAGCAGAAAGC |
| | | UGAUCAACGGAAUCAGAGACAAGCAGAGCGGAAAGACAAUCCUG |
| | | GACUUCCUGAAGAGCGACGGAUUCGCAAACAGAAACUUCAUGCA |
| | | GCUGAUCCACGACGACAGCCUGACAUUCAAGGAAGACAUCCAGAA |
| | | GGCACAGGUCAGCGGACAGGGAGACAGCCUGCACGAACACAUCGC |
| | | AAACCUGGCAGGAAGCCCGGCAAUCAAGAAGGGAAUCCUGCAGA |
| | | CAGUCAAGGUCGUCGACGAACUGGUCAAGGUCAUGGGAAGACAC |
| | | AAGCCGGAAAACAUCGUCAUCGAAAUGGCAAGAGAAAACCAGAC |
| | | AACACAGAAGGGACAGAAGAACAGCAGAGAAAGAAUGAAGAGAA |
| | | UCGAAGAAGGAAUCAAGGAACUGGGAAGCCAGAUCCUGAAGGAA |
| | | CACCCGGUCGAAAACACACAGCUGCAGAACGAAAAGCUGUACCUG |
| | | UACUACCUGCAGAACGGAAGAGACAUGUACGUCGACCAGGAACU |
| | | GGACAUCAACAGACUGAGCGACUACGACGUCGACCACAUCGUCCC |
| | | GCAGAGCUUCCUGAAGGACGACAGCAUCGACAACAAGGUCCUGAC |
| | | AAGAAGCGACAAGAACAGAGGAAAGAGCGACAACGUCCCGAGCG |
| | | AAGAAGUCGUCAAGAAGAUGAAGAACUACUGGAGACAGCUGCUG |
| | | AACGCAAAGCUGAUCACACAGAGAAAGUUCGACAACCUGACAAA |
| | | GGCAGAGAGAGGAGGACUGAGCGAACUGGACAAGGCAGGAUUCA |
| | | UCAAGAGACAGCUGGUCGAAACAAGACAGAUCACAAAGCACGUC |
| | | GCACAGAUCCUGGACAGCAGAAUGAACACAAAGUACGACGAAAA |
| | | CGACAAGCUGAUCAGAGAAGUCAAGGUCAUCACACUGAAGAGCA |
| | | AGCUGGUCAGCGACUUCAGAAAGGACUUCCAGUUCUACAAGGUC |
| | | AGAGAAAUCAACAACUACCACCACGCACACGACGCAUACCUGAAC |
| | | GCAGUCGUCGGAACAGCACUGAUCAAGAAGUACCCGAAGCUGGA |
| | | AAGCGAAUUCGUCUACGGAGACUACAAGGUCUACGACGUCAGAA |
| | | AGAUGAUCGCAAAGAGCGAACAGGAAAUCGGAAAGGCAACAGCA |
| | | AAGUACUUCUUCUACAGCAACAUCAUGAACUUCUUCAAGACAGA |
| | | AAUCACACUGGCAAACGGAGAAAUCAGAAAGAGACCGCUGAUCG |
| | | AAACAAACGGAGAAACAGGAGAAAUCGUCUGGGACAAGGGAAGA |
| | | GACUUCGCAACAGUCAGAAAGGUCCUGAGCAUGCCGCAGGUCAAC |
| | | AUCGUCAAGAAGACAGAAGUCCAGACAGGAGGAUUCAGCAAGGA |
| | | AAGCAUCCUGCCGAAGAGAAACAGCGACAAGCUGAUCGCAAGAA |
| | | AGAAGGACUGGGACCCGAAGAAGUACGGAGGAUUCGACAGCCCG |
| | | ACAGUCGCAUACAGCGUCCUGGUCGUCGCAAAGGUCGAAAAGGG |
| | | AAAGAGCAAGAAGCUGAAGAGCGUCAAGGAACUGCUGGGAAUCA |
| | | CAAUCAUGGAAAGAAGCAGCUUCGAAAAGAACCCGAUCGACUUC |
| | | CUGGAAGCAAAGGGAUACAAGGAAGUCAAGAAGGACCUGAUCAU |
| | | CAAGCUGCCGAAGUACAGCCUGUUCGAACUGGAAAACGGAAGAA |
| | | AGAGAAUGCUGGCAAGCGCAGGAGAACUGCAGAAGGGAAACGAA |
| | | CUGGCACUGCCGAGCAAGUACGUCAACUUCCUGUACCUGGCAAGC |
| | | CACUACGAAAAGCUGAAGGGAAGCCCGGAAGACAACGAACAGAA |
| | | GCAGCUGUUCGUCGAACAGCACAAGCACUACCUGGACGAAAUCAU |
| | | CGAACAGAUCAGCGAAUUCAGCAAGAGAGUCAUCCUGGCAGACG |
| | | CAAACCUGGACAAGGUCCUGAGCGCAUACAACAAGCACAGAGACA |
| | | AGCCGAUCAGAGAACAGGCAGAAAACAUCAUCCACCUGUUCACAC |
| | | UGACAAACCUGGGAGCACCGGCAGCAUUCAAGUACUUCGACACAA |
| | | CAAUCGACAGAAAGAGAUACACAAGCACAAAGGAAGUCCUGGAC |
| | | GCAACACUGAUCCACCAGAGCAUCACAGGACUGUACGAAACAAGA |
| | | AUCGACCUGAGCCAGCUGGGAGGAGAC |
| | | GGAAGCGGAAGCCCGAAGAAGAAGAGAAAGGUCGACGGAAGCCC |
| | | GAAGAAGAAGAGAAAGGUCGACAGCGGA |
| 47 | Cas9 nickase | ATGGACAAGAAGTACTCCATCGGCCTGGCCATCGGCACCAACTCCG |
| | ORF using low A | TGGGCTGGGCCGTGATCACCGACGAGTACAAGGTGCCCTCCAAGAA |
| | codons of Table | GTTCAAGGTGCTGGGCAACACCGACCGGCACTCCATCAAGAAGAAC |
| | 4, with start and | CTGATCGGCGCCCTGCTGTTCGACTCCGGCGAGACCGCCGAGGCCA |
| | stop codons | CCCGGCTGAAGCGGACCGCCCGGCGGCGGTACACCCGGCGGAAGA |
| | | ACCGGATCTGCTACCTGCAGGAGATCTTCTCCAACGAGATGGCCAA |
| | | GGTGGACGACTCCTTCTTCCACCGGCTGGAGGAGTCCTTCCTGGTG |
| | | GAGGAGGACAAGAAGCACGAGCGGCACCCCATCTTCGGCAACATC |
| | | GTGGACGAGGTGGCCTACCACGAGAAGTACCCCACCATCTACCACC |
| | | TGCGGAAGAAGCTGGTGGACTCCACCGACAAGGCCGACCTGCGGCT |
| | | GATCTACCTGGCCCTGGCCCACATGATCAAGTTCCGGGGCCACTTC |
| | | CTGATCGAGGGCGACCTGAACCCCGACAACTCCGACGTGGACAAGC |
| | | TGTTCATCCAGCTGGTGCAGACCTACAACCAGCTGTTCGAGGAGAA |
| | | CCCCATCAACGCCTCCGGCGTGGACGCCAAGGCCATCCTGTCCGCC |
| | | CGGCTGTCCAAGTCCCGGCGGCTGGAGAACCTGATCGCCCAGCTGC |
| | | CCGGCGAGAAGAAGAACGGCCTGTTCGGCAACCTGATCGCCCTGTC |
| | | CCTGGGCCTGACCCCCAACTTCAAGTCCAACTTCGACCTGGCCGAG |
| | | GACGCCAAGCTGCAGCTGTCCAAGGACACCTACGACGACGACCTGG |
| | | ACAACCTGCTGGCCCAGATCGGCGACCAGTACGCCGACCTGTTCCT |
| | | GGCCGCCAAGAACCTGTCCGACGCCATCCTGCTGTCCGACATCCTG |
| | | CGGGTGAACACCGAGATCACCAAGGCCCCCCTGTCCGCCTCCATGA |
| | | TCAAGCGGTACGACGAGCACCACCAGGACCTGACCCTGCTGAAGGC |
| | | CCTGGTGCGGCAGCAGCTGCCCGAGAAGTACAAGGAGATCTTCTTC |
| | | GACCAGTCCAAGAACGGCTACGCCGGCTACATCGACGGCGGCGCCT |
| | | CCCAGGAGGAGTTCTACAAGTTCATCAAGCCCATCCTGGAGAAGAT |
| | | GGACGGCACCGAGGAGCTGCTGGTGAAGCTGAACCGGGAGGACCT |
| | | GCTGCGGAAGCAGCGGACCTTCGACAACGGCTCCATCCCCCACCAG |
| | | ATCCACCTGGGCGAGCTGCACGCCATCCTGCGGCGGCAGGAGGACT |
| | | TCTACCCCTTCCTGAAGGACAACCGGGAGAAGATCGAGAAGATCCT |
| | | GACCTTCCGGATCCCCTACTACGTGGGCCCCCTGGCCCGGGGCAAC |
| | | TCCCGGTTCGCCTGGATGACCCGGAAGTCCGAGGAGACCATCACCC |
| | | CCTGGAACTTCGAGGAGGTGGTGGACAAGGGCGCCTCCGCCCAGTC |
| | | CTTCATCGAGCGGATGACCAACTTCGACAAGAACCTGCCCAACGAG |
| | | AAGGTGCTGCCCAAGCACTCCCTGCTGTACGAGTACTTCACCGTGT |
| | | ACAACGAGCTGACCAAGGTGAAGTACGTGACCGAGGGCATGCGGA |
| | | AGCCCGCCTTCCTGTCCGGCGAGCAGAAGAAGGCCATCGTGGACCT |
| | | GCTGTTCAAGACCAACCGGAAGGTGACCGTGAAGCAGCTGAAGGA |
| | | GGACTACTTCAAGAAGATCGAGTGCTTCGACTCCGTGGAGATCTCC |
| | | GGCGTGGAGGACCGGTTCAACGCCTCCCTGGGCACCTACCACGACC |
| | | TGCTGAAGATCATCAAGGACAAGGACTTCCTGGACAACGAGGAGA |
| | | ACGAGGACATCCTGGAGGACATCGTGCTGACCCTGACCCTGTTCGA |
| | | GGACCGGGAGATGATCGAGGAGCGGCTGAAGACCTACGCCCACCT |
| | | GTTCGACGACAAGGTGATGAAGCAGCTGAAGCGGCGGCGGTACAC |
| | | CGGCTGGGGCCGGCTGTCCCGGAAGCTGATCAACGGCATCCGGGAC |
| | | AAGCAGTCCGGCAAGACCATCCTGGACTTCCTGAAGTCCGACGGCT |
| | | TCGCCAACCGGAACTTCATGCAGCTGATCCACGACGACTCCCTGAC |
| | | CTTCAAGGAGGACATCCAGAAGGCCCAGGTGTCCGGCCAGGGCGA |
| | | CTCCCTGCACGAGCACATCGCCAACCTGGCCGGCTCCCCCGCCATC |
| | | AAGAAGGGCATCCTGCAGACCGTGAAGGTGGTGGACGAGCTGGTG |
| | | AAGGTGATGGGCCGGCACAAGCCCGAGAACATCGTGATCGAGATG |
| | | GCCCGGGAGAACCAGACCACCCAGAAGGGCCAGAAGAACTCCCGG |
| | | GAGCGGATGAAGCGGATCGAGGAGGGCATCAAGGAGCTGGGCTCC |
| | | CAGATCCTGAAGGAGCACCCCGTGGAGAACACCCAGCTGCAGAAC |
| | | GAGAAGCTGTACCTGTACTACCTGCAGAACGGCCGGGACATGTACG |
| | | TGGACCAGGAGCTGGACATCAACCGGCTGTCCGACTACGACGTGGA |
| | | CCACATCGTGCCCCAGTCCTTCCTGAAGGACGACTCCATCGACAAC |
| | | AAGGTGCTGACCCGGTCCGACAAGAACCGGGGCAAGTCCGACAAC |
| | | GTGCCCTCCGAGGAGGTGGTGAAGAAGATGAAGAACTACTGGCGG |
| | | CAGCTGCTGAACGCCAAGCTGATCACCCAGCGGAAGTTCGACAACC |
| | | TGACCAAGGCCGAGCGGGGCGGCCTGTCCGAGCTGGACAAGGCCG |
| | | GCTTCATCAAGCGGCAGCTGGTGGAGACCCGGCAGATCACCAAGCA |
| | | CGTGGCCCAGATCCTGGACTCCCGGATGAACACCAAGTACGACGAG |
| | | AACGACAAGCTGATCCGGGAGGTGAAGGTGATCACCCTGAAGTCC |
| | | AAGCTGGTGTCCGACTTCCGGAAGGACTTCCAGTTCTACAAGGTGC |
| | | GGGAGATCAACAACTACCACCACGCCCACGACGCCTACCTGAACGC |
| | | CGTGGTGGGCACCGCCCTGATCAAGAAGTACCCCAAGCTGGAGTCC |
| | | GAGTTCGTGTACGGCGACTACAAGGTGTACGACGTGCGGAAGATGA |
| | | TCGCCAAGTCCGAGCAGGAGATCGGCAAGGCCACCGCCAAGTACTT |
| | | CTTCTACTCCAACATCATGAACTTCTTCAAGACCGAGATCACCCTGG |
| | | CCAACGGCGAGATCCGGAAGCGGCCCCTGATCGAGACCAACGGCG |
| | | AGACCGGCGAGATCGTGTGGGACAAGGGCCGGGACTTCGCCACCG |
| | | TGCGGAAGGTGCTGTCCATGCCCCAGGTGAACATCGTGAAGAAGAC |
| | | CGAGGTGCAGACCGGCGGCTTCTCCAAGGAGTCCATCCTGCCCAAG |
| | | CGGAACTCCGACAAGCTGATCGCCCGGAAGAAGGACTGGGACCCC |
| | | AAGAAGTACGGCGGCTTCGACTCCCCCACCGTGGCCTACTCCGTGC |
| | | TGGTGGTGGCCAAGGTGGAGAAGGGCAAGTCCAAGAAGCTGAAGT |
| | | CCGTGAAGGAGCTGCTGGGCATCACCATCATGGAGCGGTCCTCCTT |
| | | CGAGAAGAACCCCATCGACTTCCTGGAGGCCAAGGGCTACAAGGA |
| | | GGTGAAGAAGGACCTGATCATCAAGCTGCCCAAGTACTCCCTGTTC |
| | | GAGCTGGAGAACGGCCGGAAGCGGATGCTGGCCTCCGCCGGCGAG |
| | | CTGCAGAAGGGCAACGAGCTGGCCCTGCCCTCCAAGTACGTGAACT |
| | | TCCTGTACCTGGCCTCCCACTACGAGAAGCTGAAGGGCTCCCCCGA |
| | | GGACAACGAGCAGAAGCAGCTGTTCGTGGAGCAGCACAAGCACTA |
| | | CCTGGACGAGATCATCGAGCAGATCTCCGAGTTCTCCAAGCGGGTG |
| | | ATCCTGGCCGACGCCAACCTGGACAAGGTGCTGTCCGCCTACAACA |
| | | AGCACCGGGACAAGCCCATCCGGGAGCAGGCCGAGAACATCATCC |
| | | ACCTGTTCACCCTGACCAACCTGGGCGCCCCCGCCGCCTTCAAGTA |
| | | CTTCGACACCACCATCGACCGGAAGCGGTACACCTCCACCAAGGAG |
| | | GTGCTGGACGCCACCCTGATCCACCAGTCCATCACCGGCCTGTACG |
| | | AGACCCGGATCGACCTGTCCCAGCTGGGCGGCGACGGCGGCGGCTC |
| | | CCCCAAGAAGAAGCGGAAGGTGTGA |
| 48 | Cas9 nickase | ATGGACAAGAAGTACTCCATCGGCCTGGCCATCGGCACCAACTCCG |
| | ORF using low A | TGGGCTGGGCCGTGATCACCGACGAGTACAAGGTGCCCTCCAAGAA |
| | codons of Table | GTTCAAGGTGCTGGGCAACACCGACCGGCACTCCATCAAGAAGAAC |
| | 4, with start and | CTGATCGGCGCCCTGCTGTTCGACTCCGGCGAGACCGCCGAGGCCA |
| | stop codons and | CCCGGCTGAAGCGGACCGCCCGGCGGCGGTACACCCGGCGGAAGA |
| | no NLS | ACCGGATCTGCTACCTGCAGGAGATCTTCTCCAACGAGATGGCCAA |
| | | GGTGGACGACTCCTTCTTCCACCGGCTGGAGGAGTCCTTCCTGGTG |
| | | GAGGAGGACAAGAAGCACGAGCGGCACCCCATCTTCGGCAACATC |
| | | GTGGACGAGGTGGCCTACCACGAGAAGTACCCCACCATCTACCACC |
| | | TGCGGAAGAAGCTGGTGGACTCCACCGACAAGGCCGACCTGCGGCT |
| | | GATCTACCTGGCCCTGGCCCACATGATCAAGTTCCGGGGCCACTTC |
| | | CTGATCGAGGGCGACCTGAACCCCGACAACTCCGACGTGGACAAGC |
| | | TGTTCATCCAGCTGGTGCAGACCTACAACCAGCTGTTCGAGGAGAA |
| | | CCCCATCAACGCCTCCGGCGTGGACGCCAAGGCCATCCTGTCCGCC |
| | | CGGCTGTCCAAGTCCCGGCGGCTGGAGAACCTGATCGCCCAGCTGC |
| | | CCGGCGAGAAGAAGAACGGCCTGTTCGGCAACCTGATCGCCCTGTC |
| | | CCTGGGCCTGACCCCCAACTTCAAGTCCAACTTCGACCTGGCCGAG |
| | | GACGCCAAGCTGCAGCTGTCCAAGGACACCTACGACGACGACCTGG |
| | | ACAACCTGCTGGCCCAGATCGGCGACCAGTACGCCGACCTGTTCCT |
| | | GGCCGCCAAGAACCTGTCCGACGCCATCCTGCTGTCCGACATCCTG |
| | | CGGGTGAACACCGAGATCACCAAGGCCCCCCTGTCCGCCTCCATGA |
| | | TCAAGCGGTACGACGAGCACCACCAGGACCTGACCCTGCTGAAGGC |
| | | CCTGGTGCGGCAGCAGCTGCCCGAGAAGTACAAGGAGATCTTCTTC |
| | | GACCAGTCCAAGAACGGCTACGCCGGCTACATCGACGGCGGCGCCT |
| | | CCCAGGAGGAGTTCTACAAGTTCATCAAGCCCATCCTGGAGAAGAT |
| | | GGACGGCACCGAGGAGCTGCTGGTGAAGCTGAACCGGGAGGACCT |
| | | GCTGCGGAAGCAGCGGACCTTCGACAACGGCTCCATCCCCCACCAG |
| | | ATCCACCTGGGCGAGCTGCACGCCATCCTGCGGCGGCAGGAGGACT |
| | | TCTACCCCTTCCTGAAGGACAACCGGGAGAAGATCGAGAAGATCCT |
| | | GACCTTCCGGATCCCCTACTACGTGGGCCCCCTGGCCCGGGGCAAC |
| | | TCCCGGTTCGCCTGGATGACCCGGAAGTCCGAGGAGACCATCACCC |
| | | CCTGGAACTTCGAGGAGGTGGTGGACAAGGGCGCCTCCGCCCAGTC |
| | | CTTCATCGAGCGGATGACCAACTTCGACAAGAACCTGCCCAACGAG |
| | | AAGGTGCTGCCCAAGCACTCCCTGCTGTACGAGTACTTCACCGTGT |
| | | ACAACGAGCTGACCAAGGTGAAGTACGTGACCGAGGGCATGCGGA |
| | | AGCCCGCCTTCCTGTCCGGCGAGCAGAAGAAGGCCATCGTGGACCT |
| | | GCTGTTCAAGACCAACCGGAAGGTGACCGTGAAGCAGCTGAAGGA |
| | | GGACTACTTCAAGAAGATCGAGTGCTTCGACTCCGTGGAGATCTCC |
| | | GGCGTGGAGGACCGGTTCAACGCCTCCCTGGGCACCTACCACGACC |
| | | TGCTGAAGATCATCAAGGACAAGGACTTCCTGGACAACGAGGAGA |
| | | ACGAGGACATCCTGGAGGACATCGTGCTGACCCTGACCCTGTTCGA |
| | | GGACCGGGAGATGATCGAGGAGCGGCTGAAGACCTACGCCCACCT |
| | | GTTCGACGACAAGGTGATGAAGCAGCTGAAGCGGCGGCGGTACAC |
| | | CGGCTGGGGCCGGCTGTCCCGGAAGCTGATCAACGGCATCCGGGAC |
| | | AAGCAGTCCGGCAAGACCATCCTGGACTTCCTGAAGTCCGACGGCT |
| | | TCGCCAACCGGAACTTCATGCAGCTGATCCACGACGACTCCCTGAC |
| | | CTTCAAGGAGGACATCCAGAAGGCCCAGGTGTCCGGCCAGGGCGA |
| | | CTCCCTGCACGAGCACATCGCCAACCTGGCCGGCTCCCCCGCCATC |
| | | AAGAAGGGCATCCTGCAGACCGTGAAGGTGGTGGACGAGCTGGTG |
| | | AAGGTGATGGGCCGGCACAAGCCCGAGAACATCGTGATCGAGATG |
| | | GCCCGGGAGAACCAGACCACCCAGAAGGGCCAGAAGAACTCCCGG |
| | | GAGCGGATGAAGCGGATCGAGGAGGGCATCAAGGAGCTGGGCTCC |
| | | CAGATCCTGAAGGAGCACCCCGTGGAGAACACCCAGCTGCAGAAC |
| | | GAGAAGCTGTACCTGTACTACCTGCAGAACGGCCGGGACATGTACG |
| | | TGGACCAGGAGCTGGACATCAACCGGCTGTCCGACTACGACGTGGA |
| | | CCACATCGTGCCCCAGTCCTTCCTGAAGGACGACTCCATCGACAAC |
| | | AAGGTGCTGACCCGGTCCGACAAGAACCGGGGCAAGTCCGACAAC |
| | | GTGCCCTCCGAGGAGGTGGTGAAGAAGATGAAGAACTACTGGCGG |
| | | CAGCTGCTGAACGCCAAGCTGATCACCCAGCGGAAGTTCGACAACC |
| | | TGACCAAGGCCGAGCGGGGCGGCCTGTCCGAGCTGGACAAGGCCG |
| | | GCTTCATCAAGCGGCAGCTGGTGGAGACCCGGCAGATCACCAAGCA |
| | | CGTGGCCCAGATCCTGGACTCCCGGATGAACACCAAGTACGACGAG |
| | | AACGACAAGCTGATCCGGGAGGTGAAGGTGATCACCCTGAAGTCC |
| | | AAGCTGGTGTCCGACTTCCGGAAGGACTTCCAGTTCTACAAGGTGC |
| | | GGGAGATCAACAACTACCACCACGCCCACGACGCCTACCTGAACGC |
| | | CGTGGTGGGCACCGCCCTGATCAAGAAGTACCCCAAGCTGGAGTCC |
| | | GAGTTCGTGTACGGCGACTACAAGGTGTACGACGTGCGGAAGATGA |
| | | TCGCCAAGTCCGAGCAGGAGATCGGCAAGGCCACCGCCAAGTACTT |
| | | CTTCTACTCCAACATCATGAACTTCTTCAAGACCGAGATCACCCTGG |
| | | CCAACGGCGAGATCCGGAAGCGGCCCCTGATCGAGACCAACGGCG |
| | | AGACCGGCGAGATCGTGTGGGACAAGGGCCGGGACTTCGCCACCG |
| | | TGCGGAAGGTGCTGTCCATGCCCCAGGTGAACATCGTGAAGAAGAC |
| | | CGAGGTGCAGACCGGCGGCTTCTCCAAGGAGTCCATCCTGCCCAAG |
| | | CGGAACTCCGACAAGCTGATCGCCCGGAAGAAGGACTGGGACCCC |
| | | AAGAAGTACGGCGGCTTCGACTCCCCCACCGTGGCCTACTCCGTGC |
| | | TGGTGGTGGCCAAGGTGGAGAAGGGCAAGTCCAAGAAGCTGAAGT |
| | | CCGTGAAGGAGCTGCTGGGCATCACCATCATGGAGCGGTCCTCCTT |
| | | CGAGAAGAACCCCATCGACTTCCTGGAGGCCAAGGGCTACAAGGA |
| | | GGTGAAGAAGGACCTGATCATCAAGCTGCCCAAGTACTCCCTGTTC |
| | | GAGCTGGAGAACGGCCGGAAGCGGATGCTGGCCTCCGCCGGCGAG |
| | | CTGCAGAAGGGCAACGAGCTGGCCCTGCCCTCCAAGTACGTGAACT |
| | | TCCTGTACCTGGCCTCCCACTACGAGAAGCTGAAGGGCTCCCCCGA |
| | | GGACAACGAGCAGAAGCAGCTGTTCGTGGAGCAGCACAAGCACTA |
| | | CCTGGACGAGATCATCGAGCAGATCTCCGAGTTCTCCAAGCGGGTG |
| | | ATCCTGGCCGACGCCAACCTGGACAAGGTGCTGTCCGCCTACAACA |
| | | AGCACCGGGACAAGCCCATCCGGGAGCAGGCCGAGAACATCATCC |
| | | ACCTGTTCACCCTGACCAACCTGGGCGCCCCCGCCGCCTTCAAGTA |
| | | CTTCGACACCACCATCGACCGGAAGCGGTACACCTCCACCAAGGAG |
| | | GTGCTGGACGCCACCCTGATCCACCAGTCCATCACCGGCCTGTACG |
| | | AGACCCGGATCGACCTGTCCCAGCTGGGCGGCGACTGA |
| 49 | Cas9 nickase | ATGGACAAGAAGTACTCCATCGGCCTGGCCATCGGCACCAACTCCG |
| | ORF using low A | TGGGCTGGGCCGTGATCACCGACGAGTACAAGGTGCCCTCCAAGAA |
| | codons of Table | GTTCAAGGTGCTGGGCAACACCGACCGGCACTCCATCAAGAAGAAC |
| | 4, with two C- | CTGATCGGCGCCCTGCTGTTCGACTCCGGCGAGACCGCCGAGGCCA |
| | terminal NLS | CCCGGCTGAAGCGGACCGCCCGGCGGCGGTACACCCGGCGGAAGA |
| | sequences and | ACCGGATCTGCTACCTGCAGGAGATCTTCTCCAACGAGATGGCCAA |
| | start and stop | GGTGGACGACTCCTTCTTCCACCGGCTGGAGGAGTCCTTCCTGGTG |
| | codons | GAGGAGGACAAGAAGCACGAGCGGCACCCCATCTTCGGCAACATC |
| | | GTGGACGAGGTGGCCTACCACGAGAAGTACCCCACCATCTACCACC |
| | | TGCGGAAGAAGCTGGTGGACTCCACCGACAAGGCCGACCTGCGGCT |
| | | GATCTACCTGGCCCTGGCCCACATGATCAAGTTCCGGGGCCACTTC |
| | | CTGATCGAGGGCGACCTGAACCCCGACAACTCCGACGTGGACAAGC |
| | | TGTTCATCCAGCTGGTGCAGACCTACAACCAGCTGTTCGAGGAGAA |
| | | CCCCATCAACGCCTCCGGCGTGGACGCCAAGGCCATCCTGTCCGCC |
| | | CGGCTGTCCAAGTCCCGGCGGCTGGAGAACCTGATCGCCCAGCTGC |
| | | CCGGCGAGAAGAAGAACGGCCTGTTCGGCAACCTGATCGCCCTGTC |
| | | CCTGGGCCTGACCCCCAACTTCAAGTCCAACTTCGACCTGGCCGAG |
| | | GACGCCAAGCTGCAGCTGTCCAAGGACACCTACGACGACGACCTGG |
| | | ACAACCTGCTGGCCCAGATCGGCGACCAGTACGCCGACCTGTTCCT |
| | | GGCCGCCAAGAACCTGTCCGACGCCATCCTGCTGTCCGACATCCTG |
| | | CGGGTGAACACCGAGATCACCAAGGCCCCCCTGTCCGCCTCCATGA |
| | | TCAAGCGGTACGACGAGCACCACCAGGACCTGACCCTGCTGAAGGC |
| | | CCTGGTGCGGCAGCAGCTGCCCGAGAAGTACAAGGAGATCTTCTTC |
| | | GACCAGTCCAAGAACGGCTACGCCGGCTACATCGACGGCGGCGCCT |
| | | CCCAGGAGGAGTTCTACAAGTTCATCAAGCCCATCCTGGAGAAGAT |
| | | GGACGGCACCGAGGAGCTGCTGGTGAAGCTGAACCGGGAGGACCT |
| | | GCTGCGGAAGCAGCGGACCTTCGACAACGGCTCCATCCCCCACCAG |
| | | ATCCACCTGGGCGAGCTGCACGCCATCCTGCGGCGGCAGGAGGACT |
| | | TCTACCCCTTCCTGAAGGACAACCGGGAGAAGATCGAGAAGATCCT |
| | | GACCTTCCGGATCCCCTACTACGTGGGCCCCCTGGCCCGGGGCAAC |
| | | TCCCGGTTCGCCTGGATGACCCGGAAGTCCGAGGAGACCATCACCC |
| | | CCTGGAACTTCGAGGAGGTGGTGGACAAGGGCGCCTCCGCCCAGTC |
| | | CTTCATCGAGCGGATGACCAACTTCGACAAGAACCTGCCCAACGAG |
| | | AAGGTGCTGCCCAAGCACTCCCTGCTGTACGAGTACTTCACCGTGT |
| | | ACAACGAGCTGACCAAGGTGAAGTACGTGACCGAGGGCATGCGGA |
| | | AGCCCGCCTTCCTGTCCGGCGAGCAGAAGAAGGCCATCGTGGACCT |
| | | GCTGTTCAAGACCAACCGGAAGGTGACCGTGAAGCAGCTGAAGGA |
| | | GGACTACTTCAAGAAGATCGAGTGCTTCGACTCCGTGGAGATCTCC |
| | | GGCGTGGAGGACCGGTTCAACGCCTCCCTGGGCACCTACCACGACC |
| | | TGCTGAAGATCATCAAGGACAAGGACTTCCTGGACAACGAGGAGA |
| | | ACGAGGACATCCTGGAGGACATCGTGCTGACCCTGACCCTGTTCGA |
| | | GGACCGGGAGATGATCGAGGAGCGGCTGAAGACCTACGCCCACCT |
| | | GTTCGACGACAAGGTGATGAAGCAGCTGAAGCGGCGGCGGTACAC |
| | | CGGCTGGGGCCGGCTGTCCCGGAAGCTGATCAACGGCATCCGGGAC |
| | | AAGCAGTCCGGCAAGACCATCCTGGACTTCCTGAAGTCCGACGGCT |
| | | TCGCCAACCGGAACTTCATGCAGCTGATCCACGACGACTCCCTGAC |
| | | CTTCAAGGAGGACATCCAGAAGGCCCAGGTGTCCGGCCAGGGCGA |
| | | CTCCCTGCACGAGCACATCGCCAACCTGGCCGGCTCCCCCGCCATC |
| | | AAGAAGGGCATCCTGCAGACCGTGAAGGTGGTGGACGAGCTGGTG |
| | | AAGGTGATGGGCCGGCACAAGCCCGAGAACATCGTGATCGAGATG |
| | | GCCCGGGAGAACCAGACCACCCAGAAGGGCCAGAAGAACTCCCGG |
| | | GAGCGGATGAAGCGGATCGAGGAGGGCATCAAGGAGCTGGGCTCC |
| | | CAGATCCTGAAGGAGCACCCCGTGGAGAACACCCAGCTGCAGAAC |
| | | GAGAAGCTGTACCTGTACTACCTGCAGAACGGCCGGGACATGTACG |
| | | TGGACCAGGAGCTGGACATCAACCGGCTGTCCGACTACGACGTGGA |
| | | CCACATCGTGCCCCAGTCCTTCCTGAAGGACGACTCCATCGACAAC |
| | | AAGGTGCTGACCCGGTCCGACAAGAACCGGGGCAAGTCCGACAAC |
| | | GTGCCCTCCGAGGAGGTGGTGAAGAAGATGAAGAACTACTGGCGG |
| | | CAGCTGCTGAACGCCAAGCTGATCACCCAGCGGAAGTTCGACAACC |
| | | TGACCAAGGCCGAGCGGGGCGGCCTGTCCGAGCTGGACAAGGCCG |
| | | GCTTCATCAAGCGGCAGCTGGTGGAGACCCGGCAGATCACCAAGCA |
| | | CGTGGCCCAGATCCTGGACTCCCGGATGAACACCAAGTACGACGAG |
| | | AACGACAAGCTGATCCGGGAGGTGAAGGTGATCACCCTGAAGTCC |
| | | AAGCTGGTGTCCGACTTCCGGAAGGACTTCCAGTTCTACAAGGTGC |
| | | GGGAGATCAACAACTACCACCACGCCCACGACGCCTACCTGAACGC |
| | | CGTGGTGGGCACCGCCCTGATCAAGAAGTACCCCAAGCTGGAGTCC |
| | | GAGTTCGTGTACGGCGACTACAAGGTGTACGACGTGCGGAAGATGA |
| | | TCGCCAAGTCCGAGCAGGAGATCGGCAAGGCCACCGCCAAGTACTT |
| | | CTTCTACTCCAACATCATGAACTTCTTCAAGACCGAGATCACCCTGG |
| | | CCAACGGCGAGATCCGGAAGCGGCCCCTGATCGAGACCAACGGCG |
| | | AGACCGGCGAGATCGTGTGGGACAAGGGCCGGGACTTCGCCACCG |
| | | TGCGGAAGGTGCTGTCCATGCCCCAGGTGAACATCGTGAAGAAGAC |
| | | CGAGGTGCAGACCGGCGGCTTCTCCAAGGAGTCCATCCTGCCCAAG |
| | | CGGAACTCCGACAAGCTGATCGCCCGGAAGAAGGACTGGGACCCC |
| | | AAGAAGTACGGCGGCTTCGACTCCCCCACCGTGGCCTACTCCGTGC |
| | | TGGTGGTGGCCAAGGTGGAGAAGGGCAAGTCCAAGAAGCTGAAGT |
| | | CCGTGAAGGAGCTGCTGGGCATCACCATCATGGAGCGGTCCTCCTT |
| | | CGAGAAGAACCCCATCGACTTCCTGGAGGCCAAGGGCTACAAGGA |
| | | GGTGAAGAAGGACCTGATCATCAAGCTGCCCAAGTACTCCCTGTTC |
| | | GAGCTGGAGAACGGCCGGAAGCGGATGCTGGCCTCCGCCGGCGAG |
| | | CTGCAGAAGGGCAACGAGCTGGCCCTGCCCTCCAAGTACGTGAACT |
| | | TCCTGTACCTGGCCTCCCACTACGAGAAGCTGAAGGGCTCCCCCGA |
| | | GGACAACGAGCAGAAGCAGCTGTTCGTGGAGCAGCACAAGCACTA |
| | | CCTGGACGAGATCATCGAGCAGATCTCCGAGTTCTCCAAGCGGGTG |
| | | ATCCTGGCCGACGCCAACCTGGACAAGGTGCTGTCCGCCTACAACA |
| | | AGCACCGGGACAAGCCCATCCGGGAGCAGGCCGAGAACATCATCC |
| | | ACCTGTTCACCCTGACCAACCTGGGCGCCCCCGCCGCCTTCAAGTA |
| | | CTTCGACACCACCATCGACCGGAAGCGGTACACCTCCACCAAGGAG |
| | | GTGCTGGACGCCACCCTGATCCACCAGTCCATCACCGGCCTGTACG |
| | | AGACCCGGATCGACCTGTCCCAGCTGGGCGGCGACGGCTCCGGCTC |
| | | CCCCAAGAAGAAGCGGAAGGTGGACGGCTCCCCCAAGAAGAAGCG |
| | | GAAGGTGGACTCCGGCTGA |
| 50 | Cas9 nickase | ATGGACAAGAAGTACAGCATCGGCCTGGCCATCGGCACCAACAGC |
| | ORF using low | GTGGGCTGGGCCGTGATCACCGACGAGTACAAGGTGCCCAGCAAG |
| | A/U codons of | AAGTTCAAGGTGCTGGGCAACACCGACCGGCACAGCATCAAGAAG |
| | Table 4, with start | AACCTGATCGGCGCCCTGCTGTTCGACAGCGGCGAGACCGCCGAGG |
| | and stop codons | CCACCCGGCTGAAGCGGACCGCCCGGCGGCGGTACACCCGGCGGA |
| | | AGAACCGGATCTGCTACCTGCAGGAGATCTTCAGCAACGAGATGGC |
| | | CAAGGTGGACGACAGCTTCTTCCACCGGCTGGAGGAGAGCTTCCTG |
| | | GTGGAGGAGGACAAGAAGCACGAGCGGCACCCCATCTTCGGCAAC |
| | | ATCGTGGACGAGGTGGCCTACCACGAGAAGTACCCCACCATCTACC |
| | | ACCTGCGGAAGAAGCTGGTGGACAGCACCGACAAGGCCGACCTGC |
| | | GGCTGATCTACCTGGCCCTGGCCCACATGATCAAGTTCCGGGGCCA |
| | | CTTCCTGATCGAGGGCGACCTGAACCCCGACAACAGCGACGTGGAC |
| | | AAGCTGTTCATCCAGCTGGTGCAGACCTACAACCAGCTGTTCGAGG |
| | | AGAACCCCATCAACGCCAGCGGCGTGGACGCCAAGGCCATCCTGA |
| | | GCGCCCGGCTGAGCAAGAGCCGGCGGCTGGAGAACCTGATCGCCC |
| | | AGCTGCCCGGCGAGAAGAAGAACGGCCTGTTCGGCAACCTGATCGC |
| | | CCTGAGCCTGGGCCTGACCCCCAACTTCAAGAGCAACTTCGACCTG |
| | | GCCGAGGACGCCAAGCTGCAGCTGAGCAAGGACACCTACGACGAC |
| | | GACCTGGACAACCTGCTGGCCCAGATCGGCGACCAGTACGCCGACC |
| | | TGTTCCTGGCCGCCAAGAACCTGAGCGACGCCATCCTGCTGAGCGA |
| | | CATCCTGCGGGTGAACACCGAGATCACCAAGGCCCCCCTGAGCGCC |
| | | AGCATGATCAAGCGGTACGACGAGCACCACCAGGACCTGACCCTGC |
| | | TGAAGGCCCTGGTGCGGCAGCAGCTGCCCGAGAAGTACAAGGAGA |
| | | TCTTCTTCGACCAGAGCAAGAACGGCTACGCCGGCTACATCGACGG |
| | | CGGCGCCAGCCAGGAGGAGTTCTACAAGTTCATCAAGCCCATCCTG |
| | | GAGAAGATGGACGGCACCGAGGAGCTGCTGGTGAAGCTGAACCGG |
| | | GAGGACCTGCTGCGGAAGCAGCGGACCTTCGACAACGGCAGCATC |
| | | CCCCACCAGATCCACCTGGGCGAGCTGCACGCCATCCTGCGGCGGC |
| | | AGGAGGACTTCTACCCCTTCCTGAAGGACAACCGGGAGAAGATCGA |
| | | GAAGATCCTGACCTTCCGGATCCCCTACTACGTGGGCCCCCTGGCC |
| | | CGGGGCAACAGCCGGTTCGCCTGGATGACCCGGAAGAGCGAGGAG |
| | | ACCATCACCCCCTGGAACTTCGAGGAGGTGGTGGACAAGGGCGCCA |
| | | GCGCCCAGAGCTTCATCGAGCGGATGACCAACTTCGACAAGAACCT |
| | | GCCCAACGAGAAGGTGCTGCCCAAGCACAGCCTGCTGTACGAGTAC |
| | | TTCACCGTGTACAACGAGCTGACCAAGGTGAAGTACGTGACCGAGG |
| | | GCATGCGGAAGCCCGCCTTCCTGAGCGGCGAGCAGAAGAAGGCCA |
| | | TCGTGGACCTGCTGTTCAAGACCAACCGGAAGGTGACCGTGAAGCA |
| | | GCTGAAGGAGGACTACTTCAAGAAGATCGAGTGCTTCGACAGCGTG |
| | | GAGATCAGCGGCGTGGAGGACCGGTTCAACGCCAGCCTGGGCACCT |
| | | ACCACGACCTGCTGAAGATCATCAAGGACAAGGACTTCCTGGACAA |
| | | CGAGGAGAACGAGGACATCCTGGAGGACATCGTGCTGACCCTGAC |
| | | CCTGTTCGAGGACCGGGAGATGATCGAGGAGCGGCTGAAGACCTA |
| | | CGCCCACCTGTTCGACGACAAGGTGATGAAGCAGCTGAAGCGGCG |
| | | GCGGTACACCGGCTGGGGCCGGCTGAGCCGGAAGCTGATCAACGG |
| | | CATCCGGGACAAGCAGAGCGGCAAGACCATCCTGGACTTCCTGAAG |
| | | AGCGACGGCTTCGCCAACCGGAACTTCATGCAGCTGATCCACGACG |
| | | ACAGCCTGACCTTCAAGGAGGACATCCAGAAGGCCCAGGTGAGCG |
| | | GCCAGGGCGACAGCCTGCACGAGCACATCGCCAACCTGGCCGGCA |
| | | GCCCCGCCATCAAGAAGGGCATCCTGCAGACCGTGAAGGTGGTGG |
| | | ACGAGCTGGTGAAGGTGATGGGCCGGCACAAGCCCGAGAACATCG |
| | | TGATCGAGATGGCCCGGGAGAACCAGACCACCCAGAAGGGCCAGA |
| | | AGAACAGCCGGGAGCGGATGAAGCGGATCGAGGAGGGCATCAAGG |
| | | AGCTGGGCAGCCAGATCCTGAAGGAGCACCCCGTGGAGAACACCC |
| | | AGCTGCAGAACGAGAAGCTGTACCTGTACTACCTGCAGAACGGCCG |
| | | GGACATGTACGTGGACCAGGAGCTGGACATCAACCGGCTGAGCGA |
| | | CTACGACGTGGACCACATCGTGCCCCAGAGCTTCCTGAAGGACGAC |
| | | AGCATCGACAACAAGGTGCTGACCCGGAGCGACAAGAACCGGGGC |
| | | AAGAGCGACAACGTGCCCAGCGAGGAGGTGGTGAAGAAGATGAAG |
| | | AACTACTGGCGGCAGCTGCTGAACGCCAAGCTGATCACCCAGCGGA |
| | | AGTTCGACAACCTGACCAAGGCCGAGCGGGGCGGCCTGAGCGAGC |
| | | TGGACAAGGCCGGCTTCATCAAGCGGCAGCTGGTGGAGACCCGGC |
| | | AGATCACCAAGCACGTGGCCCAGATCCTGGACAGCCGGATGAACA |
| | | CCAAGTACGACGAGAACGACAAGCTGATCCGGGAGGTGAAGGTGA |
| | | TCACCCTGAAGAGCAAGCTGGTGAGCGACTTCCGGAAGGACTTCCA |
| | | GTTCTACAAGGTGCGGGAGATCAACAACTACCACCACGCCCACGAC |
| | | GCCTACCTGAACGCCGTGGTGGGCACCGCCCTGATCAAGAAGTACC |
| | | CCAAGCTGGAGAGCGAGTTCGTGTACGGCGACTACAAGGTGTACGA |
| | | CGTGCGGAAGATGATCGCCAAGAGCGAGCAGGAGATCGGCAAGGC |
| | | CACCGCCAAGTACTTCTTCTACAGCAACATCATGAACTTCTTCAAGA |
| | | CCGAGATCACCCTGGCCAACGGCGAGATCCGGAAGCGGCCCCTGAT |
| | | CGAGACCAACGGCGAGACCGGCGAGATCGTGTGGGACAAGGGCCG |
| | | GGACTTCGCCACCGTGCGGAAGGTGCTGAGCATGCCCCAGGTGAAC |
| | | ATCGTGAAGAAGACCGAGGTGCAGACCGGCGGCTTCAGCAAGGAG |
| | | AGCATCCTGCCCAAGCGGAACAGCGACAAGCTGATCGCCCGGAAG |
| | | AAGGACTGGGACCCCAAGAAGTACGGCGGCTTCGACAGCCCCACC |
| | | GTGGCCTACAGCGTGCTGGTGGTGGCCAAGGTGGAGAAGGGCAAG |
| | | AGCAAGAAGCTGAAGAGCGTGAAGGAGCTGCTGGGCATCACCATC |
| | | ATGGAGCGGAGCAGCTTCGAGAAGAACCCCATCGACTTCCTGGAGG |
| | | CCAAGGGCTACAAGGAGGTGAAGAAGGACCTGATCATCAAGCTGC |
| | | CCAAGTACAGCCTGTTCGAGCTGGAGAACGGCCGGAAGCGGATGCT |
| | | GGCCAGCGCCGGCGAGCTGCAGAAGGGCAACGAGCTGGCCCTGCC |
| | | CAGCAAGTACGTGAACTTCCTGTACCTGGCCAGCCACTACGAGAAG |
| | | CTGAAGGGCAGCCCCGAGGACAACGAGCAGAAGCAGCTGTTCGTG |
| | | GAGCAGCACAAGCACTACCTGGACGAGATCATCGAGCAGATCAGC |
| | | GAGTTCAGCAAGCGGGTGATCCTGGCCGACGCCAACCTGGACAAG |
| | | GTGCTGAGCGCCTACAACAAGCACCGGGACAAGCCCATCCGGGAG |
| | | CAGGCCGAGAACATCATCCACCTGTTCACCCTGACCAACCTGGGCG |
| | | CCCCCGCCGCCTTCAAGTACTTCGACACCACCATCGACCGGAAGCG |
| | | GTACACCAGCACCAAGGAGGTGCTGGACGCCACCCTGATCCACCAG |
| | | AGCATCACCGGCCTGTACGAGACCCGGATCGACCTGAGCCAGCTGG |
| | | GCGGCGACGGCGGCGGCAGCCCCAAGAAGAAGCGGAAGGTGTGA |
| 51 | Cas9 nickase | ATGGACAAGAAGTACAGCATCGGCCTGGCCATCGGCACCAACAGC |
| | ORF using low | GTGGGCTGGGCCGTGATCACCGACGAGTACAAGGTGCCCAGCAAG |
| | A/U codons of | AAGTTCAAGGTGCTGGGCAACACCGACCGGCACAGCATCAAGAAG |
| | Table 4, with two | AACCTGATCGGCGCCCTGCTGTTCGACAGCGGCGAGACCGCCGAGG |
| | C-terminal NLS | CCACCCGGCTGAAGCGGACCGCCCGGCGGCGGTACACCCGGCGGA |
| | sequences and | AGAACCGGATCTGCTACCTGCAGGAGATCTTCAGCAACGAGATGGC |
| | start and stop | CAAGGTGGACGACAGCTTCTTCCACCGGCTGGAGGAGAGCTTCCTG |
| | codons | GTGGAGGAGGACAAGAAGCACGAGCGGCACCCCATCTTCGGCAAC |
| | | ATCGTGGACGAGGTGGCCTACCACGAGAAGTACCCCACCATCTACC |
| | | ACCTGCGGAAGAAGCTGGTGGACAGCACCGACAAGGCCGACCTGC |
| | | GGCTGATCTACCTGGCCCTGGCCCACATGATCAAGTTCCGGGGCCA |
| | | CTTCCTGATCGAGGGCGACCTGAACCCCGACAACAGCGACGTGGAC |
| | | AAGCTGTTCATCCAGCTGGTGCAGACCTACAACCAGCTGTTCGAGG |
| | | AGAACCCCATCAACGCCAGCGGCGTGGACGCCAAGGCCATCCTGA |
| | | GCGCCCGGCTGAGCAAGAGCCGGCGGCTGGAGAACCTGATCGCCC |
| | | AGCTGCCCGGCGAGAAGAAGAACGGCCTGTTCGGCAACCTGATCGC |
| | | CCTGAGCCTGGGCCTGACCCCCAACTTCAAGAGCAACTTCGACCTG |
| | | GCCGAGGACGCCAAGCTGCAGCTGAGCAAGGACACCTACGACGAC |
| | | GACCTGGACAACCTGCTGGCCCAGATCGGCGACCAGTACGCCGACC |
| | | TGTTCCTGGCCGCCAAGAACCTGAGCGACGCCATCCTGCTGAGCGA |
| | | CATCCTGCGGGTGAACACCGAGATCACCAAGGCCCCCCTGAGCGCC |
| | | AGCATGATCAAGCGGTACGACGAGCACCACCAGGACCTGACCCTGC |
| | | TGAAGGCCCTGGTGCGGCAGCAGCTGCCCGAGAAGTACAAGGAGA |
| | | TCTTCTTCGACCAGAGCAAGAACGGCTACGCCGGCTACATCGACGG |
| | | CGGCGCCAGCCAGGAGGAGTTCTACAAGTTCATCAAGCCCATCCTG |
| | | GAGAAGATGGACGGCACCGAGGAGCTGCTGGTGAAGCTGAACCGG |
| | | GAGGACCTGCTGCGGAAGCAGCGGACCTTCGACAACGGCAGCATC |
| | | CCCCACCAGATCCACCTGGGCGAGCTGCACGCCATCCTGCGGCGGC |
| | | AGGAGGACTTCTACCCCTTCCTGAAGGACAACCGGGAGAAGATCGA |
| | | GAAGATCCTGACCTTCCGGATCCCCTACTACGTGGGCCCCCTGGCC |
| | | CGGGGCAACAGCCGGTTCGCCTGGATGACCCGGAAGAGCGAGGAG |
| | | ACCATCACCCCCTGGAACTTCGAGGAGGTGGTGGACAAGGGCGCCA |
| | | GCGCCCAGAGCTTCATCGAGCGGATGACCAACTTCGACAAGAACCT |
| | | GCCCAACGAGAAGGTGCTGCCCAAGCACAGCCTGCTGTACGAGTAC |
| | | TTCACCGTGTACAACGAGCTGACCAAGGTGAAGTACGTGACCGAGG |
| | | GCATGCGGAAGCCCGCCTTCCTGAGCGGCGAGCAGAAGAAGGCCA |
| | | TCGTGGACCTGCTGTTCAAGACCAACCGGAAGGTGACCGTGAAGCA |
| | | GCTGAAGGAGGACTACTTCAAGAAGATCGAGTGCTTCGACAGCGTG |
| | | GAGATCAGCGGCGTGGAGGACCGGTTCAACGCCAGCCTGGGCACCT |
| | | ACCACGACCTGCTGAAGATCATCAAGGACAAGGACTTCCTGGACAA |
| | | CGAGGAGAACGAGGACATCCTGGAGGACATCGTGCTGACCCTGAC |
| | | CCTGTTCGAGGACCGGGAGATGATCGAGGAGCGGCTGAAGACCTA |
| | | CGCCCACCTGTTCGACGACAAGGTGATGAAGCAGCTGAAGCGGCG |
| | | GCGGTACACCGGCTGGGGCCGGCTGAGCCGGAAGCTGATCAACGG |
| | | CATCCGGGACAAGCAGAGCGGCAAGACCATCCTGGACTTCCTGAAG |
| | | AGCGACGGCTTCGCCAACCGGAACTTCATGCAGCTGATCCACGACG |
| | | ACAGCCTGACCTTCAAGGAGGACATCCAGAAGGCCCAGGTGAGCG |
| | | GCCAGGGCGACAGCCTGCACGAGCACATCGCCAACCTGGCCGGCA |
| | | GCCCCGCCATCAAGAAGGGCATCCTGCAGACCGTGAAGGTGGTGG |
| | | ACGAGCTGGTGAAGGTGATGGGCCGGCACAAGCCCGAGAACATCG |
| | | TGATCGAGATGGCCCGGGAGAACCAGACCACCCAGAAGGGCCAGA |
| | | AGAACAGCCGGGAGCGGATGAAGCGGATCGAGGAGGGCATCAAGG |
| | | AGCTGGGCAGCCAGATCCTGAAGGAGCACCCCGTGGAGAACACCC |
| | | AGCTGCAGAACGAGAAGCTGTACCTGTACTACCTGCAGAACGGCCG |
| | | GGACATGTACGTGGACCAGGAGCTGGACATCAACCGGCTGAGCGA |
| | | CTACGACGTGGACCACATCGTGCCCCAGAGCTTCCTGAAGGACGAC |
| | | AGCATCGACAACAAGGTGCTGACCCGGAGCGACAAGAACCGGGGC |
| | | AAGAGCGACAACGTGCCCAGCGAGGAGGTGGTGAAGAAGATGAAG |
| | | AACTACTGGCGGCAGCTGCTGAACGCCAAGCTGATCACCCAGCGGA |
| | | AGTTCGACAACCTGACCAAGGCCGAGCGGGGCGGCCTGAGCGAGC |
| | | TGGACAAGGCCGGCTTCATCAAGCGGCAGCTGGTGGAGACCCGGC |
| | | AGATCACCAAGCACGTGGCCCAGATCCTGGACAGCCGGATGAACA |
| | | CCAAGTACGACGAGAACGACAAGCTGATCCGGGAGGTGAAGGTGA |
| | | TCACCCTGAAGAGCAAGCTGGTGAGCGACTTCCGGAAGGACTTCCA |
| | | GTTCTACAAGGTGCGGGAGATCAACAACTACCACCACGCCCACGAC |
| | | GCCTACCTGAACGCCGTGGTGGGCACCGCCCTGATCAAGAAGTACC |
| | | CCAAGCTGGAGAGCGAGTTCGTGTACGGCGACTACAAGGTGTACGA |
| | | CGTGCGGAAGATGATCGCCAAGAGCGAGCAGGAGATCGGCAAGGC |
| | | CACCGCCAAGTACTTCTTCTACAGCAACATCATGAACTTCTTCAAGA |
| | | CCGAGATCACCCTGGCCAACGGCGAGATCCGGAAGCGGCCCCTGAT |
| | | CGAGACCAACGGCGAGACCGGCGAGATCGTGTGGGACAAGGGCCG |
| | | GGACTTCGCCACCGTGCGGAAGGTGCTGAGCATGCCCCAGGTGAAC |
| | | ATCGTGAAGAAGACCGAGGTGCAGACCGGCGGCTTCAGCAAGGAG |
| | | AGCATCCTGCCCAAGCGGAACAGCGACAAGCTGATCGCCCGGAAG |
| | | AAGGACTGGGACCCCAAGAAGTACGGCGGCTTCGACAGCCCCACC |
| | | GTGGCCTACAGCGTGCTGGTGGTGGCCAAGGTGGAGAAGGGCAAG |
| | | AGCAAGAAGCTGAAGAGCGTGAAGGAGCTGCTGGGCATCACCATC |
| | | ATGGAGCGGAGCAGCTTCGAGAAGAACCCCATCGACTTCCTGGAGG |
| | | CCAAGGGCTACAAGGAGGTGAAGAAGGACCTGATCATCAAGCTGC |
| | | CCAAGTACAGCCTGTTCGAGCTGGAGAACGGCCGGAAGCGGATGCT |
| | | GGCCAGCGCCGGCGAGCTGCAGAAGGGCAACGAGCTGGCCCTGCC |
| | | CAGCAAGTACGTGAACTTCCTGTACCTGGCCAGCCACTACGAGAAG |
| | | CTGAAGGGCAGCCCCGAGGACAACGAGCAGAAGCAGCTGTTCGTG |
| | | GAGCAGCACAAGCACTACCTGGACGAGATCATCGAGCAGATCAGC |
| | | GAGTTCAGCAAGCGGGTGATCCTGGCCGACGCCAACCTGGACAAG |
| | | GTGCTGAGCGCCTACAACAAGCACCGGGACAAGCCCATCCGGGAG |
| | | CAGGCCGAGAACATCATCCACCTGTTCACCCTGACCAACCTGGGCG |
| | | CCCCCGCCGCCTTCAAGTACTTCGACACCACCATCGACCGGAAGCG |
| | | GTACACCAGCACCAAGGAGGTGCTGGACGCCACCCTGATCCACCAG |
| | | AGCATCACCGGCCTGTACGAGACCCGGATCGACCTGAGCCAGCTGG |
| | | GCGGCGACGGCAGCGGCAGCCCCAAGAAGAAGCGGAAGGTGGACG |
| | | GCAGCCCCAAGAAGAAGCGGAAGGTGGACAGCGGCTGA |
| 52 | Cas9 nickase | ATGGACAAGAAGTACAGCATCGGCCTGGCCATCGGCACCAACAGC |
| | ORF using low | GTGGGCTGGGCCGTGATCACCGACGAGTACAAGGTGCCCAGCAAG |
| | A/U codons of | AAGTTCAAGGTGCTGGGCAACACCGACCGGCACAGCATCAAGAAG |
| | Table 4, with start | AACCTGATCGGCGCCCTGCTGTTCGACAGCGGCGAGACCGCCGAGG |
| | and stop codons | CCACCCGGCTGAAGCGGACCGCCCGGCGGCGGTACACCCGGCGGA |
| | and no NLS | AGAACCGGATCTGCTACCTGCAGGAGATCTTCAGCAACGAGATGGC |
| | | CAAGGTGGACGACAGCTTCTTCCACCGGCTGGAGGAGAGCTTCCTG |
| | | GTGGAGGAGGACAAGAAGCACGAGCGGCACCCCATCTTCGGCAAC |
| | | ATCGTGGACGAGGTGGCCTACCACGAGAAGTACCCCACCATCTACC |
| | | ACCTGCGGAAGAAGCTGGTGGACAGCACCGACAAGGCCGACCTGC |
| | | GGCTGATCTACCTGGCCCTGGCCCACATGATCAAGTTCCGGGGCCA |
| | | CTTCCTGATCGAGGGCGACCTGAACCCCGACAACAGCGACGTGGAC |
| | | AAGCTGTTCATCCAGCTGGTGCAGACCTACAACCAGCTGTTCGAGG |
| | | AGAACCCCATCAACGCCAGCGGCGTGGACGCCAAGGCCATCCTGA |
| | | GCGCCCGGCTGAGCAAGAGCCGGCGGCTGGAGAACCTGATCGCCC |
| | | AGCTGCCCGGCGAGAAGAAGAACGGCCTGTTCGGCAACCTGATCGC |
| | | CCTGAGCCTGGGCCTGACCCCCAACTTCAAGAGCAACTTCGACCTG |
| | | GCCGAGGACGCCAAGCTGCAGCTGAGCAAGGACACCTACGACGAC |
| | | GACCTGGACAACCTGCTGGCCCAGATCGGCGACCAGTACGCCGACC |
| | | TGTTCCTGGCCGCCAAGAACCTGAGCGACGCCATCCTGCTGAGCGA |
| | | CATCCTGCGGGTGAACACCGAGATCACCAAGGCCCCCCTGAGCGCC |
| | | AGCATGATCAAGCGGTACGACGAGCACCACCAGGACCTGACCCTGC |
| | | TGAAGGCCCTGGTGCGGCAGCAGCTGCCCGAGAAGTACAAGGAGA |
| | | TCTTCTTCGACCAGAGCAAGAACGGCTACGCCGGCTACATCGACGG |
| | | CGGCGCCAGCCAGGAGGAGTTCTACAAGTTCATCAAGCCCATCCTG |
| | | GAGAAGATGGACGGCACCGAGGAGCTGCTGGTGAAGCTGAACCGG |
| | | GAGGACCTGCTGCGGAAGCAGCGGACCTTCGACAACGGCAGCATC |
| | | CCCCACCAGATCCACCTGGGCGAGCTGCACGCCATCCTGCGGCGGC |
| | | AGGAGGACTTCTACCCCTTCCTGAAGGACAACCGGGAGAAGATCGA |
| | | GAAGATCCTGACCTTCCGGATCCCCTACTACGTGGGCCCCCTGGCC |
| | | CGGGGCAACAGCCGGTTCGCCTGGATGACCCGGAAGAGCGAGGAG |
| | | ACCATCACCCCCTGGAACTTCGAGGAGGTGGTGGACAAGGGCGCCA |
| | | GCGCCCAGAGCTTCATCGAGCGGATGACCAACTTCGACAAGAACCT |
| | | GCCCAACGAGAAGGTGCTGCCCAAGCACAGCCTGCTGTACGAGTAC |
| | | TTCACCGTGTACAACGAGCTGACCAAGGTGAAGTACGTGACCGAGG |
| | | GCATGCGGAAGCCCGCCTTCCTGAGCGGCGAGCAGAAGAAGGCCA |
| | | TCGTGGACCTGCTGTTCAAGACCAACCGGAAGGTGACCGTGAAGCA |
| | | GCTGAAGGAGGACTACTTCAAGAAGATCGAGTGCTTCGACAGCGTG |
| | | GAGATCAGCGGCGTGGAGGACCGGTTCAACGCCAGCCTGGGCACCT |
| | | ACCACGACCTGCTGAAGATCATCAAGGACAAGGACTTCCTGGACAA |
| | | CGAGGAGAACGAGGACATCCTGGAGGACATCGTGCTGACCCTGAC |
| | | CCTGTTCGAGGACCGGGAGATGATCGAGGAGCGGCTGAAGACCTA |
| | | CGCCCACCTGTTCGACGACAAGGTGATGAAGCAGCTGAAGCGGCG |
| | | GCGGTACACCGGCTGGGGCCGGCTGAGCCGGAAGCTGATCAACGG |
| | | CATCCGGGACAAGCAGAGCGGCAAGACCATCCTGGACTTCCTGAAG |
| | | AGCGACGGCTTCGCCAACCGGAACTTCATGCAGCTGATCCACGACG |
| | | ACAGCCTGACCTTCAAGGAGGACATCCAGAAGGCCCAGGTGAGCG |
| | | GCCAGGGCGACAGCCTGCACGAGCACATCGCCAACCTGGCCGGCA |
| | | GCCCCGCCATCAAGAAGGGCATCCTGCAGACCGTGAAGGTGGTGG |
| | | ACGAGCTGGTGAAGGTGATGGGCCGGCACAAGCCCGAGAACATCG |
| | | TGATCGAGATGGCCCGGGAGAACCAGACCACCCAGAAGGGCCAGA |
| | | AGAACAGCCGGGAGCGGATGAAGCGGATCGAGGAGGGCATCAAGG |
| | | AGCTGGGCAGCCAGATCCTGAAGGAGCACCCCGTGGAGAACACCC |
| | | AGCTGCAGAACGAGAAGCTGTACCTGTACTACCTGCAGAACGGCCG |
| | | GGACATGTACGTGGACCAGGAGCTGGACATCAACCGGCTGAGCGA |
| | | CTACGACGTGGACCACATCGTGCCCCAGAGCTTCCTGAAGGACGAC |
| | | AGCATCGACAACAAGGTGCTGACCCGGAGCGACAAGAACCGGGGC |
| | | AAGAGCGACAACGTGCCCAGCGAGGAGGTGGTGAAGAAGATGAAG |
| | | AACTACTGGCGGCAGCTGCTGAACGCCAAGCTGATCACCCAGCGGA |
| | | AGTTCGACAACCTGACCAAGGCCGAGCGGGGCGGCCTGAGCGAGC |
| | | TGGACAAGGCCGGCTTCATCAAGCGGCAGCTGGTGGAGACCCGGC |
| | | AGATCACCAAGCACGTGGCCCAGATCCTGGACAGCCGGATGAACA |
| | | CCAAGTACGACGAGAACGACAAGCTGATCCGGGAGGTGAAGGTGA |
| | | TCACCCTGAAGAGCAAGCTGGTGAGCGACTTCCGGAAGGACTTCCA |
| | | GTTCTACAAGGTGCGGGAGATCAACAACTACCACCACGCCCACGAC |
| | | GCCTACCTGAACGCCGTGGTGGGCACCGCCCTGATCAAGAAGTACC |
| | | CCAAGCTGGAGAGCGAGTTCGTGTACGGCGACTACAAGGTGTACGA |
| | | CGTGCGGAAGATGATCGCCAAGAGCGAGCAGGAGATCGGCAAGGC |
| | | CACCGCCAAGTACTTCTTCTACAGCAACATCATGAACTTCTTCAAGA |
| | | CCGAGATCACCCTGGCCAACGGCGAGATCCGGAAGCGGCCCCTGAT |
| | | CGAGACCAACGGCGAGACCGGCGAGATCGTGTGGGACAAGGGCCG |
| | | GGACTTCGCCACCGTGCGGAAGGTGCTGAGCATGCCCCAGGTGAAC |
| | | ATCGTGAAGAAGACCGAGGTGCAGACCGGCGGCTTCAGCAAGGAG |
| | | AGCATCCTGCCCAAGCGGAACAGCGACAAGCTGATCGCCCGGAAG |
| | | AAGGACTGGGACCCCAAGAAGTACGGCGGCTTCGACAGCCCCACC |
| | | GTGGCCTACAGCGTGCTGGTGGTGGCCAAGGTGGAGAAGGGCAAG |
| | | AGCAAGAAGCTGAAGAGCGTGAAGGAGCTGCTGGGCATCACCATC |
| | | ATGGAGCGGAGCAGCTTCGAGAAGAACCCCATCGACTTCCTGGAGG |
| | | CCAAGGGCTACAAGGAGGTGAAGAAGGACCTGATCATCAAGCTGC |
| | | CCAAGTACAGCCTGTTCGAGCTGGAGAACGGCCGGAAGCGGATGCT |
| | | GGCCAGCGCCGGCGAGCTGCAGAAGGGCAACGAGCTGGCCCTGCC |
| | | CAGCAAGTACGTGAACTTCCTGTACCTGGCCAGCCACTACGAGAAG |
| | | CTGAAGGGCAGCCCCGAGGACAACGAGCAGAAGCAGCTGTTCGTG |
| | | GAGCAGCACAAGCACTACCTGGACGAGATCATCGAGCAGATCAGC |
| | | GAGTTCAGCAAGCGGGTGATCCTGGCCGACGCCAACCTGGACAAG |
| | | GTGCTGAGCGCCTACAACAAGCACCGGGACAAGCCCATCCGGGAG |
| | | CAGGCCGAGAACATCATCCACCTGTTCACCCTGACCAACCTGGGCG |
| | | CCCCCGCCGCCTTCAAGTACTTCGACACCACCATCGACCGGAAGCG |
| | | GTACACCAGCACCAAGGAGGTGCTGGACGCCACCCTGATCCACCAG |
| | | AGCATCACCGGCCTGTACGAGACCCGGATCGACCTGAGCCAGCTGG |
| | | GCGGCGACTGA |
| 53 | Cas9 nickase | GACAAGAAGTACTCCATCGGCCTGGCCATCGGCACCAACTCCGTGG |
| | ORF using low A | GCTGGGCCGTGATCACCGACGAGTACAAGGTGCCCTCCAAGAAGTT |
| | codons of Table 4 | CAAGGTGCTGGGCAACACCGACCGGCACTCCATCAAGAAGAACCT |
| | (no start or stop | GATCGGCGCCCTGCTGTTCGACTCCGGCGAGACCGCCGAGGCCACC |
| | codons; suitable | CGGCTGAAGCGGACCGCCCGGCGGCGGTACACCCGGCGGAAGAAC |
| | for inclusion in | CGGATCTGCTACCTGCAGGAGATCTTCTCCAACGAGATGGCCAAGG |
| | fusion protein | TGGACGACTCCTTCTTCCACCGGCTGGAGGAGTCCTTCCTGGTGGA |
| | coding sequence) | GGAGGACAAGAAGCACGAGCGGCACCCCATCTTCGGCAACATCGT |
| | | GGACGAGGTGGCCTACCACGAGAAGTACCCCACCATCTACCACCTG |
| | | CGGAAGAAGCTGGTGGACTCCACCGACAAGGCCGACCTGCGGCTG |
| | | ATCTACCTGGCCCTGGCCCACATGATCAAGTTCCGGGGCCACTTCCT |
| | | GATCGAGGGCGACCTGAACCCCGACAACTCCGACGTGGACAAGCT |
| | | GTTCATCCAGCTGGTGCAGACCTACAACCAGCTGTTCGAGGAGAAC |
| | | CCCATCAACGCCTCCGGCGTGGACGCCAAGGCCATCCTGTCCGCCC |
| | | GGCTGTCCAAGTCCCGGCGGCTGGAGAACCTGATCGCCCAGCTGCC |
| | | CGGCGAGAAGAAGAACGGCCTGTTCGGCAACCTGATCGCCCTGTCC |
| | | CTGGGCCTGACCCCCAACTTCAAGTCCAACTTCGACCTGGCCGAGG |
| | | ACGCCAAGCTGCAGCTGTCCAAGGACACCTACGACGACGACCTGGA |
| | | CAACCTGCTGGCCCAGATCGGCGACCAGTACGCCGACCTGTTCCTG |
| | | GCCGCCAAGAACCTGTCCGACGCCATCCTGCTGTCCGACATCCTGC |
| | | GGGTGAACACCGAGATCACCAAGGCCCCCCTGTCCGCCTCCATGAT |
| | | CAAGCGGTACGACGAGCACCACCAGGACCTGACCCTGCTGAAGGC |
| | | CCTGGTGCGGCAGCAGCTGCCCGAGAAGTACAAGGAGATCTTCTTC |
| | | GACCAGTCCAAGAACGGCTACGCCGGCTACATCGACGGCGGCGCCT |
| | | CCCAGGAGGAGTTCTACAAGTTCATCAAGCCCATCCTGGAGAAGAT |
| | | GGACGGCACCGAGGAGCTGCTGGTGAAGCTGAACCGGGAGGACCT |
| | | GCTGCGGAAGCAGCGGACCTTCGACAACGGCTCCATCCCCCACCAG |
| | | ATCCACCTGGGCGAGCTGCACGCCATCCTGCGGCGGCAGGAGGACT |
| | | TCTACCCCTTCCTGAAGGACAACCGGGAGAAGATCGAGAAGATCCT |
| | | GACCTTCCGGATCCCCTACTACGTGGGCCCCCTGGCCCGGGGCAAC |
| | | TCCCGGTTCGCCTGGATGACCCGGAAGTCCGAGGAGACCATCACCC |
| | | CCTGGAACTTCGAGGAGGTGGTGGACAAGGGCGCCTCCGCCCAGTC |
| | | CTTCATCGAGCGGATGACCAACTTCGACAAGAACCTGCCCAACGAG |
| | | AAGGTGCTGCCCAAGCACTCCCTGCTGTACGAGTACTTCACCGTGT |
| | | ACAACGAGCTGACCAAGGTGAAGTACGTGACCGAGGGCATGCGGA |
| | | AGCCCGCCTTCCTGTCCGGCGAGCAGAAGAAGGCCATCGTGGACCT |
| | | GCTGTTCAAGACCAACCGGAAGGTGACCGTGAAGCAGCTGAAGGA |
| | | GGACTACTTCAAGAAGATCGAGTGCTTCGACTCCGTGGAGATCTCC |
| | | GGCGTGGAGGACCGGTTCAACGCCTCCCTGGGCACCTACCACGACC |
| | | TGCTGAAGATCATCAAGGACAAGGACTTCCTGGACAACGAGGAGA |
| | | ACGAGGACATCCTGGAGGACATCGTGCTGACCCTGACCCTGTTCGA |
| | | GGACCGGGAGATGATCGAGGAGCGGCTGAAGACCTACGCCCACCT |
| | | GTTCGACGACAAGGTGATGAAGCAGCTGAAGCGGCGGCGGTACAC |
| | | CGGCTGGGGCCGGCTGTCCCGGAAGCTGATCAACGGCATCCGGGAC |
| | | AAGCAGTCCGGCAAGACCATCCTGGACTTCCTGAAGTCCGACGGCT |
| | | TCGCCAACCGGAACTTCATGCAGCTGATCCACGACGACTCCCTGAC |
| | | CTTCAAGGAGGACATCCAGAAGGCCCAGGTGTCCGGCCAGGGCGA |
| | | CTCCCTGCACGAGCACATCGCCAACCTGGCCGGCTCCCCCGCCATC |
| | | AAGAAGGGCATCCTGCAGACCGTGAAGGTGGTGGACGAGCTGGTG |
| | | AAGGTGATGGGCCGGCACAAGCCCGAGAACATCGTGATCGAGATG |
| | | GCCCGGGAGAACCAGACCACCCAGAAGGGCCAGAAGAACTCCCGG |
| | | GAGCGGATGAAGCGGATCGAGGAGGGCATCAAGGAGCTGGGCTCC |
| | | CAGATCCTGAAGGAGCACCCCGTGGAGAACACCCAGCTGCAGAAC |
| | | GAGAAGCTGTACCTGTACTACCTGCAGAACGGCCGGGACATGTACG |
| | | TGGACCAGGAGCTGGACATCAACCGGCTGTCCGACTACGACGTGGA |
| | | CCACATCGTGCCCCAGTCCTTCCTGAAGGACGACTCCATCGACAAC |
| | | AAGGTGCTGACCCGGTCCGACAAGAACCGGGGCAAGTCCGACAAC |
| | | GTGCCCTCCGAGGAGGTGGTGAAGAAGATGAAGAACTACTGGCGG |
| | | CAGCTGCTGAACGCCAAGCTGATCACCCAGCGGAAGTTCGACAACC |
| | | TGACCAAGGCCGAGCGGGGCGGCCTGTCCGAGCTGGACAAGGCCG |
| | | GCTTCATCAAGCGGCAGCTGGTGGAGACCCGGCAGATCACCAAGCA |
| | | CGTGGCCCAGATCCTGGACTCCCGGATGAACACCAAGTACGACGAG |
| | | AACGACAAGCTGATCCGGGAGGTGAAGGTGATCACCCTGAAGTCC |
| | | AAGCTGGTGTCCGACTTCCGGAAGGACTTCCAGTTCTACAAGGTGC |
| | | GGGAGATCAACAACTACCACCACGCCCACGACGCCTACCTGAACGC |
| | | CGTGGTGGGCACCGCCCTGATCAAGAAGTACCCCAAGCTGGAGTCC |
| | | GAGTTCGTGTACGGCGACTACAAGGTGTACGACGTGCGGAAGATGA |
| | | TCGCCAAGTCCGAGCAGGAGATCGGCAAGGCCACCGCCAAGTACTT |
| | | CTTCTACTCCAACATCATGAACTTCTTCAAGACCGAGATCACCCTGG |
| | | CCAACGGCGAGATCCGGAAGCGGCCCCTGATCGAGACCAACGGCG |
| | | AGACCGGCGAGATCGTGTGGGACAAGGGCCGGGACTTCGCCACCG |
| | | TGCGGAAGGTGCTGTCCATGCCCCAGGTGAACATCGTGAAGAAGAC |
| | | CGAGGTGCAGACCGGCGGCTTCTCCAAGGAGTCCATCCTGCCCAAG |
| | | CGGAACTCCGACAAGCTGATCGCCCGGAAGAAGGACTGGGACCCC |
| | | AAGAAGTACGGCGGCTTCGACTCCCCCACCGTGGCCTACTCCGTGC |
| | | TGGTGGTGGCCAAGGTGGAGAAGGGCAAGTCCAAGAAGCTGAAGT |
| | | CCGTGAAGGAGCTGCTGGGCATCACCATCATGGAGCGGTCCTCCTT |
| | | CGAGAAGAACCCCATCGACTTCCTGGAGGCCAAGGGCTACAAGGA |
| | | GGTGAAGAAGGACCTGATCATCAAGCTGCCCAAGTACTCCCTGTTC |
| | | GAGCTGGAGAACGGCCGGAAGCGGATGCTGGCCTCCGCCGGCGAG |
| | | CTGCAGAAGGGCAACGAGCTGGCCCTGCCCTCCAAGTACGTGAACT |
| | | TCCTGTACCTGGCCTCCCACTACGAGAAGCTGAAGGGCTCCCCCGA |
| | | GGACAACGAGCAGAAGCAGCTGTTCGTGGAGCAGCACAAGCACTA |
| | | CCTGGACGAGATCATCGAGCAGATCTCCGAGTTCTCCAAGCGGGTG |
| | | ATCCTGGCCGACGCCAACCTGGACAAGGTGCTGTCCGCCTACAACA |
| | | AGCACCGGGACAAGCCCATCCGGGAGCAGGCCGAGAACATCATCC |
| | | ACCTGTTCACCCTGACCAACCTGGGCGCCCCCGCCGCCTTCAAGTA |
| | | CTTCGACACCACCATCGACCGGAAGCGGTACACCTCCACCAAGGAG |
| | | GTGCTGGACGCCACCCTGATCCACCAGTCCATCACCGGCCTGTACG |
| | | AGACCCGGATCGACCTGTCCCAGCTGGGCGGCGACGGCGGCGGCTC |
| | | CCCCAAGAAGAAGCGGAAGGTG |
| 54 | Cas9 nickase | GACAAGAAGTACTCCATCGGCCTGGCCATCGGCACCAACTCCGTGG |
| | ORF using low A | GCTGGGCCGTGATCACCGACGAGTACAAGGTGCCCTCCAAGAAGTT |
| | codons of Table 4 | CAAGGTGCTGGGCAACACCGACCGGCACTCCATCAAGAAGAACCT |
| | (no NLS and no | GATCGGCGCCCTGCTGTTCGACTCCGGCGAGACCGCCGAGGCCACC |
| | start or stop | CGGCTGAAGCGGACCGCCCGGCGGCGGTACACCCGGCGGAAGAAC |
| | codons; suitable | CGGATCTGCTACCTGCAGGAGATCTTCTCCAACGAGATGGCCAAGG |
| | for inclusion in | TGGACGACTCCTTCTTCCACCGGCTGGAGGAGTCCTTCCTGGTGGA |
| | fusion protein | GGAGGACAAGAAGCACGAGCGGCACCCCATCTTCGGCAACATCGT |
| | coding sequence) | GGACGAGGTGGCCTACCACGAGAAGTACCCCACCATCTACCACCTG |
| | | CGGAAGAAGCTGGTGGACTCCACCGACAAGGCCGACCTGCGGCTG |
| | | ATCTACCTGGCCCTGGCCCACATGATCAAGTTCCGGGGCCACTTCCT |
| | | GATCGAGGGCGACCTGAACCCCGACAACTCCGACGTGGACAAGCT |
| | | GTTCATCCAGCTGGTGCAGACCTACAACCAGCTGTTCGAGGAGAAC |
| | | CCCATCAACGCCTCCGGCGTGGACGCCAAGGCCATCCTGTCCGCCC |
| | | GGCTGTCCAAGTCCCGGCGGCTGGAGAACCTGATCGCCCAGCTGCC |
| | | CGGCGAGAAGAAGAACGGCCTGTTCGGCAACCTGATCGCCCTGTCC |
| | | CTGGGCCTGACCCCCAACTTCAAGTCCAACTTCGACCTGGCCGAGG |
| | | ACGCCAAGCTGCAGCTGTCCAAGGACACCTACGACGACGACCTGGA |
| | | CAACCTGCTGGCCCAGATCGGCGACCAGTACGCCGACCTGTTCCTG |
| | | GCCGCCAAGAACCTGTCCGACGCCATCCTGCTGTCCGACATCCTGC |
| | | GGGTGAACACCGAGATCACCAAGGCCCCCCTGTCCGCCTCCATGAT |
| | | CAAGCGGTACGACGAGCACCACCAGGACCTGACCCTGCTGAAGGC |
| | | CCTGGTGCGGCAGCAGCTGCCCGAGAAGTACAAGGAGATCTTCTTC |
| | | GACCAGTCCAAGAACGGCTACGCCGGCTACATCGACGGCGGCGCCT |
| | | CCCAGGAGGAGTTCTACAAGTTCATCAAGCCCATCCTGGAGAAGAT |
| | | GGACGGCACCGAGGAGCTGCTGGTGAAGCTGAACCGGGAGGACCT |
| | | GCTGCGGAAGCAGCGGACCTTCGACAACGGCTCCATCCCCCACCAG |
| | | ATCCACCTGGGCGAGCTGCACGCCATCCTGCGGCGGCAGGAGGACT |
| | | TCTACCCCTTCCTGAAGGACAACCGGGAGAAGATCGAGAAGATCCT |
| | | GACCTTCCGGATCCCCTACTACGTGGGCCCCCTGGCCCGGGGCAAC |
| | | TCCCGGTTCGCCTGGATGACCCGGAAGTCCGAGGAGACCATCACCC |
| | | CCTGGAACTTCGAGGAGGTGGTGGACAAGGGCGCCTCCGCCCAGTC |
| | | CTTCATCGAGCGGATGACCAACTTCGACAAGAACCTGCCCAACGAG |
| | | AAGGTGCTGCCCAAGCACTCCCTGCTGTACGAGTACTTCACCGTGT |
| | | ACAACGAGCTGACCAAGGTGAAGTACGTGACCGAGGGCATGCGGA |
| | | AGCCCGCCTTCCTGTCCGGCGAGCAGAAGAAGGCCATCGTGGACCT |
| | | GCTGTTCAAGACCAACCGGAAGGTGACCGTGAAGCAGCTGAAGGA |
| | | GGACTACTTCAAGAAGATCGAGTGCTTCGACTCCGTGGAGATCTCC |
| | | GGCGTGGAGGACCGGTTCAACGCCTCCCTGGGCACCTACCACGACC |
| | | TGCTGAAGATCATCAAGGACAAGGACTTCCTGGACAACGAGGAGA |
| | | ACGAGGACATCCTGGAGGACATCGTGCTGACCCTGACCCTGTTCGA |
| | | GGACCGGGAGATGATCGAGGAGCGGCTGAAGACCTACGCCCACCT |
| | | GTTCGACGACAAGGTGATGAAGCAGCTGAAGCGGCGGCGGTACAC |
| | | CGGCTGGGGCCGGCTGTCCCGGAAGCTGATCAACGGCATCCGGGAC |
| | | AAGCAGTCCGGCAAGACCATCCTGGACTTCCTGAAGTCCGACGGCT |
| | | TCGCCAACCGGAACTTCATGCAGCTGATCCACGACGACTCCCTGAC |
| | | CTTCAAGGAGGACATCCAGAAGGCCCAGGTGTCCGGCCAGGGCGA |
| | | CTCCCTGCACGAGCACATCGCCAACCTGGCCGGCTCCCCCGCCATC |
| | | AAGAAGGGCATCCTGCAGACCGTGAAGGTGGTGGACGAGCTGGTG |
| | | AAGGTGATGGGCCGGCACAAGCCCGAGAACATCGTGATCGAGATG |
| | | GCCCGGGAGAACCAGACCACCCAGAAGGGCCAGAAGAACTCCCGG |
| | | GAGCGGATGAAGCGGATCGAGGAGGGCATCAAGGAGCTGGGCTCC |
| | | CAGATCCTGAAGGAGCACCCCGTGGAGAACACCCAGCTGCAGAAC |
| | | GAGAAGCTGTACCTGTACTACCTGCAGAACGGCCGGGACATGTACG |
| | | TGGACCAGGAGCTGGACATCAACCGGCTGTCCGACTACGACGTGGA |
| | | CCACATCGTGCCCCAGTCCTTCCTGAAGGACGACTCCATCGACAAC |
| | | AAGGTGCTGACCCGGTCCGACAAGAACCGGGGCAAGTCCGACAAC |
| | | GTGCCCTCCGAGGAGGTGGTGAAGAAGATGAAGAACTACTGGCGG |
| | | CAGCTGCTGAACGCCAAGCTGATCACCCAGCGGAAGTTCGACAACC |
| | | TGACCAAGGCCGAGCGGGGCGGCCTGTCCGAGCTGGACAAGGCCG |
| | | GCTTCATCAAGCGGCAGCTGGTGGAGACCCGGCAGATCACCAAGCA |
| | | CGTGGCCCAGATCCTGGACTCCCGGATGAACACCAAGTACGACGAG |
| | | AACGACAAGCTGATCCGGGAGGTGAAGGTGATCACCCTGAAGTCC |
| | | AAGCTGGTGTCCGACTTCCGGAAGGACTTCCAGTTCTACAAGGTGC |
| | | GGGAGATCAACAACTACCACCACGCCCACGACGCCTACCTGAACGC |
| | | CGTGGTGGGCACCGCCCTGATCAAGAAGTACCCCAAGCTGGAGTCC |
| | | GAGTTCGTGTACGGCGACTACAAGGTGTACGACGTGCGGAAGATGA |
| | | TCGCCAAGTCCGAGCAGGAGATCGGCAAGGCCACCGCCAAGTACTT |
| | | CTTCTACTCCAACATCATGAACTTCTTCAAGACCGAGATCACCCTGG |
| | | CCAACGGCGAGATCCGGAAGCGGCCCCTGATCGAGACCAACGGCG |
| | | AGACCGGCGAGATCGTGTGGGACAAGGGCCGGGACTTCGCCACCG |
| | | TGCGGAAGGTGCTGTCCATGCCCCAGGTGAACATCGTGAAGAAGAC |
| | | CGAGGTGCAGACCGGCGGCTTCTCCAAGGAGTCCATCCTGCCCAAG |
| | | CGGAACTCCGACAAGCTGATCGCCCGGAAGAAGGACTGGGACCCC |
| | | AAGAAGTACGGCGGCTTCGACTCCCCCACCGTGGCCTACTCCGTGC |
| | | TGGTGGTGGCCAAGGTGGAGAAGGGCAAGTCCAAGAAGCTGAAGT |
| | | CCGTGAAGGAGCTGCTGGGCATCACCATCATGGAGCGGTCCTCCTT |
| | | CGAGAAGAACCCCATCGACTTCCTGGAGGCCAAGGGCTACAAGGA |
| | | GGTGAAGAAGGACCTGATCATCAAGCTGCCCAAGTACTCCCTGTTC |
| | | GAGCTGGAGAACGGCCGGAAGCGGATGCTGGCCTCCGCCGGCGAG |
| | | CTGCAGAAGGGCAACGAGCTGGCCCTGCCCTCCAAGTACGTGAACT |
| | | TCCTGTACCTGGCCTCCCACTACGAGAAGCTGAAGGGCTCCCCCGA |
| | | GGACAACGAGCAGAAGCAGCTGTTCGTGGAGCAGCACAAGCACTA |
| | | CCTGGACGAGATCATCGAGCAGATCTCCGAGTTCTCCAAGCGGGTG |
| | | ATCCTGGCCGACGCCAACCTGGACAAGGTGCTGTCCGCCTACAACA |
| | | AGCACCGGGACAAGCCCATCCGGGAGCAGGCCGAGAACATCATCC |
| | | ACCTGTTCACCCTGACCAACCTGGGCGCCCCCGCCGCCTTCAAGTA |
| | | CTTCGACACCACCATCGACCGGAAGCGGTACACCTCCACCAAGGAG |
| | | GTGCTGGACGCCACCCTGATCCACCAGTCCATCACCGGCCTGTACG |
| | | AGACCCGGATCGACCTGTCCCAGCTGGGCGGCGAC |
| 55 | Cas9 nickase | GACAAGAAGTACTCCATCGGCCTGGCCATCGGCACCAACTCCGTGG |
| | ORF using low A | GCTGGGCCGTGATCACCGACGAGTACAAGGTGCCCTCCAAGAAGTT |
| | codons of Table | CAAGGTGCTGGGCAACACCGACCGGCACTCCATCAAGAAGAACCT |
| | 4, with two C- | GATCGGCGCCCTGCTGTTCGACTCCGGCGAGACCGCCGAGGCCACC |
| | terminal NLS | CGGCTGAAGCGGACCGCCCGGCGGCGGTACACCCGGCGGAAGAAC |
| | sequences (no | CGGATCTGCTACCTGCAGGAGATCTTCTCCAACGAGATGGCCAAGG |
| | start or stop | TGGACGACTCCTTCTTCCACCGGCTGGAGGAGTCCTTCCTGGTGGA |
| | codons; suitable | GGAGGACAAGAAGCACGAGCGGCACCCCATCTTCGGCAACATCGT |
| | for inclusion in | GGACGAGGTGGCCTAC |
| | fusion protein | CACGAGAAGTACCCCACCATCTACCACCTGCGGAAGAAGCTGGTGG |
| | coding sequence) | ACTCCACCGACAAGGCCGACCTGCGGCTGATCTACCTGGCCCTGGC |
| | | CCACATGATCAAGTTCCGGGGCCACTTCCTGATCGAGGGCGACCTG |
| | | AACCCCGACAACTCCGACGTGGACAAGCTGTTCATCCAGCTGGTGC |
| | | AGACCTACAACCAGCTGTTCGAGGAGAACCCCATCAACGCCTCCGG |
| | | CGTGGACGCCAAGGCCATCCTGTCCGCCCGGCTGTCCAAGTCCCGG |
| | | CGGCTGGAGAACCTGATCGCCCAGCTGCCCGGCGAGAAGAAGAAC |
| | | GGCCTGTTCGGCAACCTGATCGCCCTGTCCCTGGGCCTGACCCCCA |
| | | ACTTCAAGTCCAACTTCGACCTGGCCGAGGACGCCAAGCTGCAGCT |
| | | GTCCAAGGACACCTACGACGACGACCTGGACAACCTGCTGGCCCAG |
| | | ATCGGCGACCAGTACGCCGACCTGTTCCTGGCCGCCAAGAACCTGT |
| | | CCGACGCCATCCTGCTGTCCGACATCCTGCGGGTGAACACCGAGAT |
| | | CACCAAGGCCCCCCTGTCCGCCTCCATGATCAAGCGGTACGACGAG |
| | | CACCACCAGGACCTGACCCTGCTGAAGGCCCTGGTGCGGCAGCAGC |
| | | TGCCCGAGAAGTACAAGGAGATCTTCTTCGACCAGTCCAAGAACGG |
| | | CTACGCCGGCTACATCGACGGCGGCGCCTCCCAGGAGGAGTTCTAC |
| | | AAGTTCATCAAGCCCATCCTGGAGAAGATGGACGGCACCGAGGAG |
| | | CTGCTGGTGAAGCTGAACCGGGAGGACCTGCTGCGGAAGCAGCGG |
| | | ACCTTCGACAACGGCTCCATCCCCCACCAGATCCACCTGGGCGAGC |
| | | TGCACGCCATCCTGCGGCGGCAGGAGGACTTCTACCCCTTCCTGAA |
| | | GGACAACCGGGAGAAGATCGAGAAGATCCTGACCTTCCGGATCCCC |
| | | TACTACGTGGGCCCCCTGGCCCGGGGCAACTCCCGGTTCGCCTGGA |
| | | TGACCCGGAAGTCCGAGGAGACCATCACCCCCTGGAACTTCGAGGA |
| | | GGTGGTGGACAAGGGCGCCTCCGCCCAGTCCTTCATCGAGCGGATG |
| | | ACCAACTTCGACAAGAACCTGCCCAACGAGAAGGTGCTGCCCAAGC |
| | | ACTCCCTGCTGTACGAGTACTTCACCGTGTACAACGAGCTGACCAA |
| | | GGTGAAGTACGTGACCGAGGGCATGCGGAAGCCCGCCTTCCTGTCC |
| | | GGCGAGCAGAAGAAGGCCATCGTGGACCTGCTGTTCAAGACCAAC |
| | | CGGAAGGTGACCGTGAAGCAGCTGAAGGAGGACTACTTCAAGAAG |
| | | ATCGAGTGCTTCGACTCCGTGGAGATCTCCGGCGTGGAGGACCGGT |
| | | TCAACGCCTCCCTGGGCACCTACCACGACCTGCTGAAGATCATCAA |
| | | GGACAAGGACTTCCTGGACAACGAGGAGAACGAGGACATCCTGGA |
| | | GGACATCGTGCTGACCCTGACCCTGTTCGAGGACCGGGAGATGATC |
| | | GAGGAGCGGCTGAAGACCTACGCCCACCTGTTCGACGACAAGGTG |
| | | ATGAAGCAGCTGAAGCGGCGGCGGTACACCGGCTGGGGCCGGCTG |
| | | TCCCGGAAGCTGATCAACGGCATCCGGGACAAGCAGTCCGGCAAG |
| | | ACCATCCTGGACTTCCTGAAGTCCGACGGCTTCGCCAACCGGAACT |
| | | TCATGCAGCTGATCCACGACGACTCCCTGACCTTCAAGGAGGACAT |
| | | CCAGAAGGCCCAGGTGTCCGGCCAGGGCGACTCCCTGCACGAGCAC |
| | | ATCGCCAACCTGGCCGGCTCCCCCGCCATCAAGAAGGGCATCCTGC |
| | | AGACCGTGAAGGTGGTGGACGAGCTGGTGAAGGTGATGGGCCGGC |
| | | ACAAGCCCGAGAACATCGTGATCGAGATGGCCCGGGAGAACCAGA |
| | | CCACCCAGAAGGGCCAGAAGAACTCCCGGGAGCGGATGAAGCGGA |
| | | TCGAGGAGGGCATCAAGGAGCTGGGCTCCCAGATCCTGAAGGAGC |
| | | ACCCCGTGGAGAACACCCAGCTGCAGAACGAGAAGCTGTACCTGTA |
| | | CTACCTGCAGAACGGCCGGGACATGTACGTGGACCAGGAGCTGGA |
| | | CATCAACCGGCTGTCCGACTACGACGTGGACCACATCGTGCCCCAG |
| | | TCCTTCCTGAAGGACGACTCCATCGACAACAAGGTGCTGACCCGGT |
| | | CCGACAAGAACCGGGGCAAGTCCGACAACGTGCCCTCCGAGGAGG |
| | | TGGTGAAGAAGATGAAGAACTACTGGCGGCAGCTGCTGAACGCCA |
| | | AGCTGATCACCCAGCGGAAGTTCGACAACCTGACCAAGGCCGAGC |
| | | GGGGCGGCCTGTCCGAGCTGGACAAGGCCGGCTTCATCAAGCGGCA |
| | | GCTGGTGGAGACCCGGCAGATCACCAAGCACGTGGCCCAGATCCTG |
| | | GACTCCCGGATGAACACCAAGTACGACGAGAACGACAAGCTGATC |
| | | CGGGAGGTGAAGGTGATCACCCTGAAGTCCAAGCTGGTGTCCGACT |
| | | TCCGGAAGGACTTCCAGTTCTACAAGGTGCGGGAGATCAACAACTA |
| | | CCACCACGCCCACGACGCCTACCTGAACGCCGTGGTGGGCACCGCC |
| | | CTGATCAAGAAGTACCCCAAGCTGGAGTCCGAGTTCGTGTACGGCG |
| | | ACTACAAGGTGTACGACGTGCGGAAGATGATCGCCAAGTCCGAGC |
| | | AGGAGATCGGCAAGGCCACCGCCAAGTACTTCTTCTACTCCAACAT |
| | | CATGAACTTCTTCAAGACCGAGATCACCCTGGCCAACGGCGAGATC |
| | | CGGAAGCGGCCCCTGATCGAGACCAACGGCGAGACCGGCGAGATC |
| | | GTGTGGGACAAGGGCCGGGACTTCGCCACCGTGCGGAAGGTGCTGT |
| | | CCATGCCCCAGGTGAACATCGTGAAGAAGACCGAGGTGCAGACCG |
| | | GCGGCTTCTCCAAGGAGTCCATCCTGCCCAAGCGGAACTCCGACAA |
| | | GCTGATCGCCCGGAAGAAGGACTGGGACCCCAAGAAGTACGGCGG |
| | | CTTCGACTCCCCCACCGTGGCCTACTCCGTGCTGGTGGTGGCCAAG |
| | | GTGGAGAAGGGCAAGTCCAAGAAGCTGAAGTCCGTGAAGGAGCTG |
| | | CTGGGCATCACCATCATGGAGCGGTCCTCCTTCGAGAAGAACCCCA |
| | | TCGACTTCCTGGAGGCCAAGGGCTACAAGGAGGTGAAGAAGGACC |
| | | TGATCATCAAGCTGCCCAAGTACTCCCTGTTCGAGCTGGAGAACGG |
| | | CCGGAAGCGGATGCTGGCCTCCGCCGGCGAGCTGCAGAAGGGCAA |
| | | CGAGCTGGCCCTGCCCTCCAAGTACGTGAACTTCCTGTACCTGGCCT |
| | | CCCACTACGAGAAGCTGAAGGGCTCCCCCGAGGACAACGAGCAGA |
| | | AGCAGCTGTTCGTGGAGCAGCACAAGCACTACCTGGACGAGATCAT |
| | | CGAGCAGATCTCCGAGTTCTCCAAGCGGGTGATCCTGGCCGACGCC |
| | | AACCTGGACAAGGTGCTGTCCGCCTACAACAAGCACCGGGACAAG |
| | | CCCATCCGGGAGCAGGCCGAGAACATCATCCACCTGTTCACCCTGA |
| | | CCAACCTGGGCGCCCCCGCCGCCTTCAAGTACTTCGACACCACCAT |
| | | CGACCGGAAGCGGTACACCTCCACCAAGGAGGTGCTGGACGCCAC |
| | | CCTGATCCACCAGTCCATCACCGGCCTGTACGAGACCCGGATCGAC |
| | | CTGTCCCAGCTGGGCGGCGACGGCTCCGGCTCCCCCAAGAAGAAGC |
| | | GGAAGGTGGACGGCTCCCCCAAGAAGAAGCGGAAGGTGGACTCCG |
| | | GC |
| 56 | Cas9 nickase | GACAAGAAGTACAGCATCGGCCTGGCCATCGGCACCAACAGCGTG |
| | ORF using low | GGCTGGGCCGTGATCACCGACGAGTACAAGGTGCCCAGCAAGAAG |
| | A/U codons of | TTCAAGGTGCTGGGCAACACCGACCGGCACAGCATCAAGAAGAAC |
| | Table 4 (no start | CTGATCGGCGCCCTGCTGTTCGACAGCGGCGAGACCGCCGAGGCCA |
| | or stop codons; | CCCGGCTGAAGCGGACCGCCCGGCGGCGGTACACCCGGCGGAAGA |
| | suitable for | ACCGGATCTGCTACCTGCAGGAGATCTTCAGCAACGAGATGGCCAA |
| | inclusion in | GGTGGACGACAGCTTCTTCCACCGGCTGGAGGAGAGCTTCCTGGTG |
| | fusion protein | GAGGAGGACAAGAAGCACGAGCGGCACCCCATCTTCGGCAACATC |
| | coding sequence) | GTGGACGAGGTGGCCTACCACGAGAAGTACCCCACCATCTACCACC |
| | | TGCGGAAGAAGCTGGTGGACAGCACCGACAAGGCCGACCTGCGGC |
| | | TGATCTACCTGGCCCTGGCCCACATGATCAAGTTCCGGGGCCACTTC |
| | | CTGATCGAGGGCGACCTGAACCCCGACAACAGCGACGTGGACAAG |
| | | CTGTTCATCCAGCTGGTGCAGACCTACAACCAGCTGTTCGAGGAGA |
| | | ACCCCATCAACGCCAGCGGCGTGGACGCCAAGGCCATCCTGAGCGC |
| | | CCGGCTGAGCAAGAGCCGGCGGCTGGAGAACCTGATCGCCCAGCT |
| | | GCCCGGCGAGAAGAAGAACGGCCTGTTCGGCAACCTGATCGCCCTG |
| | | AGCCTGGGCCTGACCCCCAACTTCAAGAGCAACTTCGACCTGGCCG |
| | | AGGACGCCAAGCTGCAGCTGAGCAAGGACACCTACGACGACGACC |
| | | TGGACAACCTGCTGGCCCAGATCGGCGACCAGTACGCCGACCTGTT |
| | | CCTGGCCGCCAAGAACCTGAGCGACGCCATCCTGCTGAGCGACATC |
| | | CTGCGGGTGAACACCGAGATCACCAAGGCCCCCCTGAGCGCCAGCA |
| | | TGATCAAGCGGTACGACGAGCACCACCAGGACCTGACCCTGCTGAA |
| | | GGCCCTGGTGCGGCAGCAGCTGCCCGAGAAGTACAAGGAGATCTTC |
| | | TTCGACCAGAGCAAGAACGGCTACGCCGGCTACATCGACGGCGGC |
| | | GCCAGCCAGGAGGAGTTCTACAAGTTCATCAAGCCCATCCTGGAGA |
| | | AGATGGACGGCACCGAGGAGCTGCTGGTGAAGCTGAACCGGGAGG |
| | | ACCTGCTGCGGAAGCAGCGGACCTTCGACAACGGCAGCATCCCCCA |
| | | CCAGATCCACCTGGGCGAGCTGCACGCCATCCTGCGGCGGCAGGAG |
| | | GACTTCTACCCCTTCCTGAAGGACAACCGGGAGAAGATCGAGAAGA |
| | | TCCTGACCTTCCGGATCCCCTACTACGTGGGCCCCCTGGCCCGGGGC |
| | | AACAGCCGGTTCGCCTGGATGACCCGGAAGAGCGAGGAGACCATC |
| | | ACCCCCTGGAACTTCGAGGAGGTGGTGGACAAGGGCGCCAGCGCC |
| | | CAGAGCTTCATCGAGCGGATGACCAACTTCGACAAGAACCTGCCCA |
| | | ACGAGAAGGTGCTGCCCAAGCACAGCCTGCTGTACGAGTACTTCAC |
| | | CGTGTACAACGAGCTGACCAAGGTGAAGTACGTGACCGAGGGCAT |
| | | GCGGAAGCCCGCCTTCCTGAGCGGCGAGCAGAAGAAGGCCATCGT |
| | | GGACCTGCTGTTCAAGACCAACCGGAAGGTGACCGTGAAGCAGCTG |
| | | AAGGAGGACTACTTCAAGAAGATCGAGTGCTTCGACAGCGTGGAG |
| | | ATCAGCGGCGTGGAGGACCGGTTCAACGCCAGCCTGGGCACCTACC |
| | | ACGACCTGCTGAAGATCATCAAGGACAAGGACTTCCTGGACAACGA |
| | | GGAGAACGAGGACATCCTGGAGGACATCGTGCTGACCCTGACCCTG |
| | | TTCGAGGACCGGGAGATGATCGAGGAGCGGCTGAAGACCTACGCC |
| | | CACCTGTTCGACGACAAGGTGATGAAGCAGCTGAAGCGGCGGCGG |
| | | TACACCGGCTGGGGCCGGCTGAGCCGGAAGCTGATCAACGGCATCC |
| | | GGGACAAGCAGAGCGGCAAGACCATCCTGGACTTCCTGAAGAGCG |
| | | ACGGCTTCGCCAACCGGAACTTCATGCAGCTGATCCACGACGACAG |
| | | CCTGACCTTCAAGGAGGACATCCAGAAGGCCCAGGTGAGCGGCCA |
| | | GGGCGACAGCCTGCACGAGCACATCGCCAACCTGGCCGGCAGCCCC |
| | | GCCATCAAGAAGGGCATCCTGCAGACCGTGAAGGTGGTGGACGAG |
| | | CTGGTGAAGGTGATGGGCCGGCACAAGCCCGAGAACATCGTGATC |
| | | GAGATGGCCCGGGAGAACCAGACCACCCAGAAGGGCCAGAAGAAC |
| | | AGCCGGGAGCGGATGAAGCGGATCGAGGAGGGCATCAAGGAGCTG |
| | | GGCAGCCAGATCCTGAAGGAGCACCCCGTGGAGAACACCCAGCTG |
| | | CAGAACGAGAAGCTGTACCTGTACTACCTGCAGAACGGCCGGGAC |
| | | ATGTACGTGGACCAGGAGCTGGACATCAACCGGCTGAGCGACTACG |
| | | ACGTGGACCACATCGTGCCCCAGAGCTTCCTGAAGGACGACAGCAT |
| | | CGACAACAAGGTGCTGACCCGGAGCGACAAGAACCGGGGCAAGAG |
| | | CGACAACGTGCCCAGCGAGGAGGTGGTGAAGAAGATGAAGAACTA |
| | | CTGGCGGCAGCTGCTGAACGCCAAGCTGATCACCCAGCGGAAGTTC |
| | | GACAACCTGACCAAGGCCGAGCGGGGCGGCCTGAGCGAGCTGGAC |
| | | AAGGCCGGCTTCATCAAGCGGCAGCTGGTGGAGACCCGGCAGATC |
| | | ACCAAGCACGTGGCCCAGATCCTGGACAGCCGGATGAACACCAAG |
| | | TACGACGAGAACGACAAGCTGATCCGGGAGGTGAAGGTGATCACC |
| | | CTGAAGAGCAAGCTGGTGAGCGACTTCCGGAAGGACTTCCAGTTCT |
| | | ACAAGGTGCGGGAGATCAACAACTACCACCACGCCCACGACGCCT |
| | | ACCTGAACGCCGTGGTGGGCACCGCCCTGATCAAGAAGTACCCCAA |
| | | GCTGGAGAGCGAGTTCGTGTACGGCGACTACAAGGTGTACGACGTG |
| | | CGGAAGATGATCGCCAAGAGCGAGCAGGAGATCGGCAAGGCCACC |
| | | GCCAAGTACTTCTTCTACAGCAACATCATGAACTTCTTCAAGACCG |
| | | AGATCACCCTGGCCAACGGCGAGATCCGGAAGCGGCCCCTGATCGA |
| | | GACCAACGGCGAGACCGGCGAGATCGTGTGGGACAAGGGCCGGGA |
| | | CTTCGCCACCGTGCGGAAGGTGCTGAGCATGCCCCAGGTGAACATC |
| | | GTGAAGAAGACCGAGGTGCAGACCGGCGGCTTCAGCAAGGAGAGC |
| | | ATCCTGCCCAAGCGGAACAGCGACAAGCTGATCGCCCGGAAGAAG |
| | | GACTGGGACCCCAAGAAGTACGGCGGCTTCGACAGCCCCACCGTGG |
| | | CCTACAGCGTGCTGGTGGTGGCCAAGGTGGAGAAGGGCAAGAGCA |
| | | AGAAGCTGAAGAGCGTGAAGGAGCTGCTGGGCATCACCATCATGG |
| | | AGCGGAGCAGCTTCGAGAAGAACCCCATCGACTTCCTGGAGGCCAA |
| | | GGGCTACAAGGAGGTGAAGAAGGACCTGATCATCAAGCTGCCCAA |
| | | GTACAGCCTGTTCGAGCTGGAGAACGGCCGGAAGCGGATGCTGGCC |
| | | AGCGCCGGCGAGCTGCAGAAGGGCAACGAGCTGGCCCTGCCCAGC |
| | | AAGTACGTGAACTTCCTGTACCTGGCCAGCCACTACGAGAAGCTGA |
| | | AGGGCAGCCCCGAGGACAACGAGCAGAAGCAGCTGTTCGTGGAGC |
| | | AGCACAAGCACTACCTGGACGAGATCATCGAGCAGATCAGCGAGTT |
| | | CAGCAAGCGGGTGATCCTGGCCGACGCCAACCTGGACAAGGTGCTG |
| | | AGCGCCTACAACAAGCACCGGGACAAGCCCATCCGGGAGCAGGCC |
| | | GAGAACATCATCCACCTGTTCACCCTGACCAACCTGGGCGCCCCCG |
| | | CCGCCTTCAAGTACTTCGACACCACCATCGACCGGAAGCGGTACAC |
| | | CAGCACCAAGGAGGTGCTGGACGCCACCCTGATCCACCAGAGCATC |
| | | ACCGGCCTGTACGAGACCCGGATCGACCTGAGCCAGCTGGGCGGCG |
| | | ACGGCGGCGGCAGCCCCAAGAAGAAGCGGAAGGTG |
| 57 | Cas9 nickase | GACAAGAAGTACAGCATCGGCCTGGCCATCGGCACCAACAGCGTG |
| | ORF using low | GGCTGGGCCGTGATCACCGACGAGTACAAGGTGCCCAGCAAGAAG |
| | A/U codons of | TTCAAGGTGCTGGGCAACACCGACCGGCACAGCATCAAGAAGAAC |
| | Table 4, with two | CTGATCGGCGCCCTGCTGTTCGACAGCGGCGAGACCGCCGAGGCCA |
| | C-terminal NLS | CCCGGCTGAAGCGGACCGCCCGGCGGCGGTACACCCGGCGGAAGA |
| | sequences (no | ACCGGATCTGCTACCTGCAGGAGATCTTCAGCAACGAGATGGCCAA |
| | start or stop | GGTGGACGACAGCTTCTTCCACCGGCTGGAGGAGAGCTTCCTGGTG |
| | codons; suitable | GAGGAGGACAAGAAGCACGAGCGGCACCCCATCTTCGGCAACATC |
| | for inclusion in | GTGGACGAGGTGGCCTACCACGAGAAGTACCCCACCATCTACCACC |
| | fusion protein | TGCGGAAGAAGCTGGTGGACAGCACCGACAAGGCCGACCTGCGGC |
| | coding sequence) | TGATCTACCTGGCCCTGGCCCACATGATCAAGTTCCGGGGCCACTTC |
| | | CTGATCGAGGGCGACCTGAACCCCGACAACAGCGACGTGGACAAG |
| | | CTGTTCATCCAGCTGGTGCAGACCTACAACCAGCTGTTCGAGGAGA |
| | | ACCCCATCAACGCCAGCGGCGTGGACGCCAAGGCCATCCTGAGCGC |
| | | CCGGCTGAGCAAGAGCCGGCGGCTGGAGAACCTGATCGCCCAGCT |
| | | GCCCGGCGAGAAGAAGAACGGCCTGTTCGGCAACCTGATCGCCCTG |
| | | AGCCTGGGCCTGACCCCCAACTTCAAGAGCAACTTCGACCTGGCCG |
| | | AGGACGCCAAGCTGCAGCTGAGCAAGGACACCTACGACGACGACC |
| | | TGGACAACCTGCTGGCCCAGATCGGCGACCAGTACGCCGACCTGTT |
| | | CCTGGCCGCCAAGAACCTGAGCGACGCCATCCTGCTGAGCGACATC |
| | | CTGCGGGTGAACACCGAGATCACCAAGGCCCCCCTGAGCGCCAGCA |
| | | TGATCAAGCGGTACGACGAGCACCACCAGGACCTGACCCTGCTGAA |
| | | GGCCCTGGTGCGGCAGCAGCTGCCCGAGAAGTACAAGGAGATCTTC |
| | | TTCGACCAGAGCAAGAACGGCTACGCCGGCTACATCGACGGCGGC |
| | | GCCAGCCAGGAGGAGTTCTACAAGTTCATCAAGCCCATCCTGGAGA |
| | | AGATGGACGGCACCGAGGAGCTGCTGGTGAAGCTGAACCGGGAGG |
| | | ACCTGCTGCGGAAGCAGCGGACCTTCGACAACGGCAGCATCCCCCA |
| | | CCAGATCCACCTGGGCGAGCTGCACGCCATCCTGCGGCGGCAGGAG |
| | | GACTTCTACCCCTTCCTGAAGGACAACCGGGAGAAGATCGAGAAGA |
| | | TCCTGACCTTCCGGATCCCCTACTACGTGGGCCCCCTGGCCCGGGGC |
| | | AACAGCCGGTTCGCCTGGATGACCCGGAAGAGCGAGGAGACCATC |
| | | ACCCCCTGGAACTTCGAGGAGGTGGTGGACAAGGGCGCCAGCGCC |
| | | CAGAGCTTCATCGAGCGGATGACCAACTTCGACAAGAACCTGCCCA |
| | | ACGAGAAGGTGCTGCCCAAGCACAGCCTGCTGTACGAGTACTTCAC |
| | | CGTGTACAACGAGCTGACCAAGGTGAAGTACGTGACCGAGGGCAT |
| | | GCGGAAGCCCGCCTTCCTGAGCGGCGAGCAGAAGAAGGCCATCGT |
| | | GGACCTGCTGTTCAAGACCAACCGGAAGGTGACCGTGAAGCAGCTG |
| | | AAGGAGGACTACTTCAAGAAGATCGAGTGCTTCGACAGCGTGGAG |
| | | ATCAGCGGCGTGGAGGACCGGTTCAACGCCAGCCTGGGCACCTACC |
| | | ACGACCTGCTGAAGATCATCAAGGACAAGGACTTCCTGGACAACGA |
| | | GGAGAACGAGGACATCCTGGAGGACATCGTGCTGACCCTGACCCTG |
| | | TTCGAGGACCGGGAGATGATCGAGGAGCGGCTGAAGACCTACGCC |
| | | CACCTGTTCGACGACAAGGTGATGAAGCAGCTGAAGCGGCGGCGG |
| | | TACACCGGCTGGGGCCGGCTGAGCCGGAAGCTGATCAACGGCATCC |
| | | GGGACAAGCAGAGCGGCAAGACCATCCTGGACTTCCTGAAGAGCG |
| | | ACGGCTTCGCCAACCGGAACTTCATGCAGCTGATCCACGACGACAG |
| | | CCTGACCTTCAAGGAGGACATCCAGAAGGCCCAGGTGAGCGGCCA |
| | | GGGCGACAGCCTGCACGAGCACATCGCCAACCTGGCCGGCAGCCCC |
| | | GCCATCAAGAAGGGCATCCTGCAGACCGTGAAGGTGGTGGACGAG |
| | | CTGGTGAAGGTGATGGGCCGGCACAAGCCCGAGAACATCGTGATC |
| | | GAGATGGCCCGGGAGAACCAGACCACCCAGAAGGGCCAGAAGAAC |
| | | AGCCGGGAGCGGATGAAGCGGATCGAGGAGGGCATCAAGGAGCTG |
| | | GGCAGCCAGATCCTGAAGGAGCACCCCGTGGAGAACACCCAGCTG |
| | | CAGAACGAGAAGCTGTACCTGTACTACCTGCAGAACGGCCGGGAC |
| | | ATGTACGTGGACCAGGAGCTGGACATCAACCGGCTGAGCGACTACG |
| | | ACGTGGACCACATCGTGCCCCAGAGCTTCCTGAAGGACGACAGCAT |
| | | CGACAACAAGGTGCTGACCCGGAGCGACAAGAACCGGGGCAAGAG |
| | | CGACAACGTGCCCAGCGAGGAGGTGGTGAAGAAGATGAAGAACTA |
| | | CTGGCGGCAGCTGCTGAACGCCAAGCTGATCACCCAGCGGAAGTTC |
| | | GACAACCTGACCAAGGCCGAGCGGGGCGGCCTGAGCGAGCTGGAC |
| | | AAGGCCGGCTTCATCAAGCGGCAGCTGGTGGAGACCCGGCAGATC |
| | | ACCAAGCACGTGGCCCAGATCCTGGACAGCCGGATGAACACCAAG |
| | | TACGACGAGAACGACAAGCTGATCCGGGAGGTGAAGGTGATCACC |
| | | CTGAAGAGCAAGCTGGTGAGCGACTTCCGGAAGGACTTCCAGTTCT |
| | | ACAAGGTGCGGGAGATCAACAACTACCACCACGCCCACGACGCCT |
| | | ACCTGAACGCCGTGGTGGGCACCGCCCTGATCAAGAAGTACCCCAA |
| | | GCTGGAGAGCGAGTTCGTGTACGGCGACTACAAGGTGTACGACGTG |
| | | CGGAAGATGATCGCCAAGAGCGAGCAGGAGATCGGCAAGGCCACC |
| | | GCCAAGTACTTCTTCTACAGCAACATCATGAACTTCTTCAAGACCG |
| | | AGATCACCCTGGCCAACGGCGAGATCCGGAAGCGGCCCCTGATCGA |
| | | GACCAACGGCGAGACCGGCGAGATCGTGTGGGACAAGGGCCGGGA |
| | | CTTCGCCACCGTGCGGAAGGTGCTGAGCATGCCCCAGGTGAACATC |
| | | GTGAAGAAGACCGAGGTGCAGACCGGCGGCTTCAGCAAGGAGAGC |
| | | ATCCTGCCCAAGCGGAACAGCGACAAGCTGATCGCCCGGAAGAAG |
| | | GACTGGGACCCCAAGAAGTACGGCGGCTTCGACAGCCCCACCGTGG |
| | | CCTACAGCGTGCTGGTGGTGGCCAAGGTGGAGAAGGGCAAGAGCA |
| | | AGAAGCTGAAGAGCGTGAAGGAGCTGCTGGGCATCACCATCATGG |
| | | AGCGGAGCAGCTTCGAGAAGAACCCCATCGACTTCCTGGAGGCCAA |
| | | GGGCTACAAGGAGGTGAAGAAGGACCTGATCATCAAGCTGCCCAA |
| | | GTACAGCCTGTTCGAGCTGGAGAACGGCCGGAAGCGGATGCTGGCC |
| | | AGCGCCGGCGAGCTGCAGAAGGGCAACGAGCTGGCCCTGCCCAGC |
| | | AAGTACGTGAACTTCCTGTACCTGGCCAGCCACTACGAGAAGCTGA |
| | | AGGGCAGCCCCGAGGACAACGAGCAGAAGCAGCTGTTCGTGGAGC |
| | | AGCACAAGCACTACCTGGACGAGATCATCGAGCAGATCAGCGAGTT |
| | | CAGCAAGCGGGTGATCCTGGCCGACGCCAACCTGGACAAGGTGCTG |
| | | AGCGCCTACAACAAGCACCGGGACAAGCCCATCCGGGAGCAGGCC |
| | | GAGAACATCATCCACCTGTTCACCCTGACCAACCTGGGCGCCCCCG |
| | | CCGCCTTCAAGTACTTCGACACCACCATCGACCGGAAGCGGTACAC |
| | | CAGCACCAAGGAGGTGCTGGACGCCACCCTGATCCACCAGAGCATC |
| | | ACCGGCCTGTACGAGACCCGGATCGACCTGAGCCAGCTGGGCGGCG |
| | | ACGGCAGCGGCAGCCCCAAGAAGAAGCGGAAGGTGGACGGCAGCC |
| | | CCAAGAAGAAGCGGAAGGTGGACAGCGGC |
| 58 | Cas9 nickase | GACAAGAAGTACAGCATCGGCCTGGCCATCGGCACCAACAGCGTG |
| | ORF using low | GGCTGGGCCGTGATCACCGACGAGTACAAGGTGCCCAGCAAGAAG |
| | A/U codons of | TTCAAGGTGCTGGGCAACACCGACCGGCACAGCATCAAGAAGAAC |
| | Table 4 (no NLS | CTGATCGGCGCCCTGCTGTTCGACAGCGGCGAGACCGCCGAGGCCA |
| | and no start or | CCCGGCTGAAGCGGACCGCCCGGCGGCGGTACACCCGGCGGAAGA |
| | stop codons; | ACCGGATCTGCTACCTGCAGGAGATCTTCAGCAACGAGATGGCCAA |
| | suitable for | GGTGGACGACAGCTTCTTCCACCGGCTGGAGGAGAGCTTCCTGGTG |
| | inclusion in | GAGGAGGACAAGAAGCACGAGCGGCACCCCATCTTCGGCAACATC |
| | fusion protein | GTGGACGAGGTGGCCTACCACGAGAAGTACCCCACCATCTACCACC |
| | coding sequence) | TGCGGAAGAAGCTGGTGGACAGCACCGACAAGGCCGACCTGCGGC |
| | | TGATCTACCTGGCCCTGGCCCACATGATCAAGTTCCGGGGCCACTTC |
| | | CTGATCGAGGGCGACCTGAACCCCGACAACAGCGACGTGGACAAG |
| | | CTGTTCATCCAGCTGGTGCAGACCTACAACCAGCTGTTCGAGGAGA |
| | | ACCCCATCAACGCCAGCGGCGTGGACGCCAAGGCCATCCTGAGCGC |
| | | CCGGCTGAGCAAGAGCCGGCGGCTGGAGAACCTGATCGCCCAGCT |
| | | GCCCGGCGAGAAGAAGAACGGCCTGTTCGGCAACCTGATCGCCCTG |
| | | AGCCTGGGCCTGACCCCCAACTTCAAGAGCAACTTCGACCTGGCCG |
| | | AGGACGCCAAGCTGCAGCTGAGCAAGGACACCTACGACGACGACC |
| | | TGGACAACCTGCTGGCCCAGATCGGCGACCAGTACGCCGACCTGTT |
| | | CCTGGCCGCCAAGAACCTGAGCGACGCCATCCTGCTGAGCGACATC |
| | | CTGCGGGTGAACACCGAGATCACCAAGGCCCCCCTGAGCGCCAGCA |
| | | TGATCAAGCGGTACGACGAGCACCACCAGGACCTGACCCTGCTGAA |
| | | GGCCCTGGTGCGGCAGCAGCTGCCCGAGAAGTACAAGGAGATCTTC |
| | | TTCGACCAGAGCAAGAACGGCTACGCCGGCTACATCGACGGCGGC |
| | | GCCAGCCAGGAGGAGTTCTACAAGTTCATCAAGCCCATCCTGGAGA |
| | | AGATGGACGGCACCGAGGAGCTGCTGGTGAAGCTGAACCGGGAGG |
| | | ACCTGCTGCGGAAGCAGCGGACCTTCGACAACGGCAGCATCCCCCA |
| | | CCAGATCCACCTGGGCGAGCTGCACGCCATCCTGCGGCGGCAGGAG |
| | | GACTTCTACCCCTTCCTGAAGGACAACCGGGAGAAGATCGAGAAGA |
| | | TCCTGACCTTCCGGATCCCCTACTACGTGGGCCCCCTGGCCCGGGGC |
| | | AACAGCCGGTTCGCCTGGATGACCCGGAAGAGCGAGGAGACCATC |
| | | ACCCCCTGGAACTTCGAGGAGGTGGTGGACAAGGGCGCCAGCGCC |
| | | CAGAGCTTCATCGAGCGGATGACCAACTTCGACAAGAACCTGCCCA |
| | | ACGAGAAGGTGCTGCCCAAGCACAGCCTGCTGTACGAGTACTTCAC |
| | | CGTGTACAACGAGCTGACCAAGGTGAAGTACGTGACCGAGGGCAT |
| | | GCGGAAGCCCGCCTTCCTGAGCGGCGAGCAGAAGAAGGCCATCGT |
| | | GGACCTGCTGTTCAAGACCAACCGGAAGGTGACCGTGAAGCAGCTG |
| | | AAGGAGGACTACTTCAAGAAGATCGAGTGCTTCGACAGCGTGGAG |
| | | ATCAGCGGCGTGGAGGACCGGTTCAACGCCAGCCTGGGCACCTACC |
| | | ACGACCTGCTGAAGATCATCAAGGACAAGGACTTCCTGGACAACGA |
| | | GGAGAACGAGGACATCCTGGAGGACATCGTGCTGACCCTGACCCTG |
| | | TTCGAGGACCGGGAGATGATCGAGGAGCGGCTGAAGACCTACGCC |
| | | CACCTGTTCGACGACAAGGTGATGAAGCAGCTGAAGCGGCGGCGG |
| | | TACACCGGCTGGGGCCGGCTGAGCCGGAAGCTGATCAACGGCATCC |
| | | GGGACAAGCAGAGCGGCAAGACCATCCTGGACTTCCTGAAGAGCG |
| | | ACGGCTTCGCCAACCGGAACTTCATGCAGCTGATCCACGACGACAG |
| | | CCTGACCTTCAAGGAGGACATCCAGAAGGCCCAGGTGAGCGGCCA |
| | | GGGCGACAGCCTGCACGAGCACATCGCCAACCTGGCCGGCAGCCCC |
| | | GCCATCAAGAAGGGCATCCTGCAGACCGTGAAGGTGGTGGACGAG |
| | | CTGGTGAAGGTGATGGGCCGGCACAAGCCCGAGAACATCGTGATC |
| | | GAGATGGCCCGGGAGAACCAGACCACCCAGAAGGGCCAGAAGAAC |
| | | AGCCGGGAGCGGATGAAGCGGATCGAGGAGGGCATCAAGGAGCTG |
| | | GGCAGCCAGATCCTGAAGGAGCACCCCGTGGAGAACACCCAGCTG |
| | | CAGAACGAGAAGCTGTACCTGTACTACCTGCAGAACGGCCGGGAC |
| | | ATGTACGTGGACCAGGAGCTGGACATCAACCGGCTGAGCGACTACG |
| | | ACGTGGACCACATCGTGCCCCAGAGCTTCCTGAAGGACGACAGCAT |
| | | CGACAACAAGGTGCTGACCCGGAGCGACAAGAACCGGGGCAAGAG |
| | | CGACAACGTGCCCAGCGAGGAGGTGGTGAAGAAGATGAAGAACTA |
| | | CTGGCGGCAGCTGCTGAACGCCAAGCTGATCACCCAGCGGAAGTTC |
| | | GACAACCTGACCAAGGCCGAGCGGGGCGGCCTGAGCGAGCTGGAC |
| | | AAGGCCGGCTTCATCAAGCGGCAGCTGGTGGAGACCCGGCAGATC |
| | | ACCAAGCACGTGGCCCAGATCCTGGACAGCCGGATGAACACCAAG |
| | | TACGACGAGAACGACAAGCTGATCCGGGAGGTGAAGGTGATCACC |
| | | CTGAAGAGCAAGCTGGTGAGCGACTTCCGGAAGGACTTCCAGTTCT |
| | | ACAAGGTGCGGGAGATCAACAACTACCACCACGCCCACGACGCCT |
| | | ACCTGAACGCCGTGGTGGGCACCGCCCTGATCAAGAAGTACCCCAA |
| | | GCTGGAGAGCGAGTTCGTGTACGGCGACTACAAGGTGTACGACGTG |
| | | CGGAAGATGATCGCCAAGAGCGAGCAGGAGATCGGCAAGGCCACC |
| | | GCCAAGTACTTCTTCTACAGCAACATCATGAACTTCTTCAAGACCG |
| | | AGATCACCCTGGCCAACGGCGAGATCCGGAAGCGGCCCCTGATCGA |
| | | GACCAACGGCGAGACCGGCGAGATCGTGTGGGACAAGGGCCGGGA |
| | | CTTCGCCACCGTGCGGAAGGTGCTGAGCATGCCCCAGGTGAACATC |
| | | GTGAAGAAGACCGAGGTGCAGACCGGCGGCTTCAGCAAGGAGAGC |
| | | ATCCTGCCCAAGCGGAACAGCGACAAGCTGATCGCCCGGAAGAAG |
| | | GACTGGGACCCCAAGAAGTACGGCGGCTTCGACAGCCCCACCGTGG |
| | | CCTACAGCGTGCTGGTGGTGGCCAAGGTGGAGAAGGGCAAGAGCA |
| | | AGAAGCTGAAGAGCGTGAAGGAGCTGCTGGGCATCACCATCATGG |
| | | AGCGGAGCAGCTTCGAGAAGAACCCCATCGACTTCCTGGAGGCCAA |
| | | GGGCTACAAGGAGGTGAAGAAGGACCTGATCATCAAGCTGCCCAA |
| | | GTACAGCCTGTTCGAGCTGGAGAACGGCCGGAAGCGGATGCTGGCC |
| | | AGCGCCGGCGAGCTGCAGAAGGGCAACGAGCTGGCCCTGCCCAGC |
| | | AAGTACGTGAACTTCCTGTACCTGGCCAGCCACTACGAGAAGCTGA |
| | | AGGGCAGCCCCGAGGACAACGAGCAGAAGCAGCTGTTCGTGGAGC |
| | | AGCACAAGCACTACCTGGACGAGATCATCGAGCAGATCAGCGAGTT |
| | | CAGCAAGCGGGTGATCCTGGCCGACGCCAACCTGGACAAGGTGCTG |
| | | AGCGCCTACAACAAGCACCGGGACAAGCCCATCCGGGAGCAGGCC |
| | | GAGAACATCATCCACCTGTTCACCCTGACCAACCTGGGCGCCCCCG |
| | | CCGCCTTCAAGTACTTCGACACCACCATCGACCGGAAGCGGTACAC |
| | | CAGCACCAAGGAGGTGCTGGACGCCACCCTGATCCACCAGAGCATC |
| | | ACCGGCCTGTACGAGACCCGGATCGACCTGAGCCAGCTGGGCGGCG |
| | | AC |
| 59 | Exemplary NLS 1 | LAAKRSRTT |
| 60 | Exemplary NLS 2 | QAAKRSRTT |
| 61 | Exemplary NLS 3 | PAPAKRERTT |
| 62 | Exemplary NLS 4 | QAAKRPRTT |
| 63 | Exemplary NLS 5 | RAAKRPRTT |
| 64 | Exemplary NLS 6 | AAAKRSWSMAA |
| 65 | Exemplary NLS 7 | AAAKRVWSMAF |
| 66 | Exemplary NLS 8 | AAAKRSWSMAF |
| 67 | Exemplary NLS 9 | AAAKRKYFAA |
| 68 | Exemplary NLS | RAAKRKAFAA |
| | 10 | |
| 69 | Exemplary NLS | RAAKRKYFAV |
| | 11 | |
| 70 | Alternate SV40 | PKKKRRV |
| | NLS | |
| 71 | Nucleoplasmin | KRPAATKKAGQAKKKK |
| | NLS | |
| 72 | amino acid | GGS |
| | sequence for | |
| | exemplary linker | |
| 73 | amino acid | GGGGS |
| | sequence for | |
| | exemplary linker | |
| 74 | amino acid | EAAAK |
| | sequence for | |
| | exemplary linker | |
| 75 | amino acid | SEGSA |
| | sequence for | |
| | exemplary linker | |
| 76 | amino acid | SEGSAGTST |
| | sequence for | |
| | exemplary linker | |
| 77 | amino acid | GGGGSGGGGS |
| | sequence for | |
| | exemplary linker | |
| 78 | amino acid | GGGGSEAAAK |
| | sequence for | |
| | exemplary linker | |
| 79 | amino acid | EAAAKGGGGS |
| | sequence for | |
| | exemplary linker | |
| 80 | amino acid | EAAAKEAAAK |
| | sequence for | |
| | exemplary linker | |
| 81 | amino acid | SEGSAGTSTESEGSA |
| | sequence for | |
| | exemplary linker | |
| 82 | amino acid | GGGGSGGGGSGGGGS |
| | sequence for | |
| | exemplary linker | |
| 83 | amino acid | GGGGSGGGGSEAAAK |
| | sequence for | |
| | exemplary linker | |
| 84 | amino acid | GGGGSEAAAKGGGGS |
| | sequence for | |
| | exemplary linker | |
| 85 | amino acid | EAAAKGGGGSEAAAK |
| | sequence for | |
| | exemplary linker | |
| 86 | amino acid | EAAAKEAAAKGGGGS |
| | sequence for | |
| | exemplary linker | |
| 87 | amino acid | SEGSAGTSTESEGSAGTSTE |
| | sequence for | |
| | exemplary linker | |
| 88 | amino acid | GGGGSGGGGSGGGGSEAAAK |
| | sequence for | |
| | exemplary linker | |
| 89 | amino acid | GGGGSGGGGSEAAAKGGGGS |
| | sequence for | |
| | exemplary linker | |
| 90 | amino acid | GGGGSEAAAKGGGGSEAAAK |
| | sequence for | |
| | exemplary linker | |
| 91 | amino acid | GGGGSEAAAKEAAAKGGGGS |
| | sequence for | |
| | exemplary linker | |
| 92 | amino acid | GGGGSEAAAKEAAAKEAAAK |
| | sequence for | |
| | exemplary linker | |
| 93 | amino acid | EAAAKGGGGSGGGGSGGGGS |
| | sequence for | |
| | exemplary linker | |
| 94 | amino acid | EAAAKGGGGSGGGGSEAAAK |
| | sequence for | |
| | exemplary linker | |
| 95 | amino acid | EAAAKGGGGSEAAAKGGGGS |
| | sequence for | |
| | exemplary linker | |
| 96 | amino acid | EAAAKGGGGSEAAAKEAAAK |
| | sequence for | |
| | exemplary linker | |
| 97 | amino acid | EAAAKEAAAKGGGGGGGGS |
| | sequence for | |
| | exemplary linker | |
| 98 | amino acid | EAAAKEAAAKGGGGSEAAAK |
| | sequence for | |
| | exemplary linker | |
| 99 | amino acid | EAAAKEAAAKEAAAKGGGGS |
| | sequence for | |
| | exemplary linker | |
| 100 | amino acid | SEGSAGTSTESEGSAGTSTESEGSA |
| | sequence for | |
| | exemplary linker | |
| 101 | amino acid | GGGGSGGGGSGGGGSGGGGSGGGGS |
| | sequence for | |
| | exemplary linker | |
| 102 | amino acid | GGGGSGGGGSGGGGSGGGGSEAAAK |
| | sequence for | |
| | exemplary linker | |
| 103 | amino acid | GGGGSGGGGSGGGGSEAAAKGGGGS |
| | sequence for | |
| | exemplary linker | |
| 104 | amino acid | GGGGSGGGGSGGGGSEAAAKEAAAK |
| | sequence for | |
| | exemplary linker | |
| 105 | amino acid | GGGGSGGGGSEAAAKGGGGSGGGGS |
| | sequence for | |
| | exemplary linker | |
| 106 | amino acid | GGGGSGGGGSEAAAKGGGGSEAAAK |
| | sequence for | |
| | exemplary linker | |
| 107 | amino acid | GGGGSGGGGSEAAAKEAAAKGGGGS |
| | sequence for | |
| | exemplary linker | |
| 108 | amino acid | GGGGSGGGGSEAAAKEAAAKEAAAK |
| | sequence for | |
| | exemplary linker | |
| 109 | amino acid | GGGGSEAAAKGGGGSGGGGSGGGGS |
| | sequence for | |
| | exemplary linker | |
| 110 | amino acid | GGGGSEAAAKGGGGSGGGGSEAAAK |
| | sequence for | |
| | exemplary linker | |
| 111 | amino acid | GGGGSEAAAKGGGGSEAAAKGGGGS |
| | sequence for | |
| | exemplary linker | |
| 112 | amino acid | GGGGSEAAAKGGGGSEAAAKEAAAK |
| | sequence for | |
| | exemplary linker | |
| 113 | amino acid | GGGGSEAAAKEAAAKGGGGSGGGGS |
| | sequence for | |
| | exemplary linker | |
| 114 | amino acid | GGGGSEAAAKEAAAKEAAAKGGGGS |
| | sequence for | |
| | exemplary linker | |
| 115 | amino acid | GGGGSEAAAKEAAAKEAAAKEAAAK |
| | sequence for | |
| | exemplary linker | |
| 116 | amino acid | EAAAKGGGGSGGGGSGGGGSGGGGS |
| | sequence for | |
| | exemplary linker | |
| 117 | amino acid | EAAAKGGGGSGGGGSGGGGSEAAAK |
| | sequence for | |
| | exemplary linker | |
| 118 | amino acid | EAAAKGGGGGGGGSEAAAKGGGGS |
| | sequence for | |
| | exemplary linker | |
| 119 | amino acid | EAAAKGGGGSGGGGSEAAAKEAAAK |
| | sequence for | |
| | exemplary linker | |
| 120 | amino acid | EAAAKGGGGSEAAAKGGGGSGGGGS |
| | sequence for | |
| | exemplary linker | |
| 121 | amino acid | EAAAKGGGGSEAAAKGGGGSEAAAK |
| | sequence for | |
| | exemplary linker | |
| 122 | amino acid | EAAAKGGGGSEAAAKEAAAKGGGGS |
| | sequence for | |
| | exemplary linker | |
| 123 | amino acid | EAAAKGGGGSEAAAKEAAAKEAAAK |
| | sequence for | |
| | exemplary linker | |
| 124 | amino acid | EAAAKEAAAKGGGGSEAAAKGGGGS |
| | sequence for | |
| | exemplary linker | |
| 125 | amino acid | EAAAKEAAAKGGGGSEAAAKEAAAK |
| | sequence for | |
| | exemplary linker | |
| 126 | amino acid | EAAAKEAAAKEAAAKGGGGSEAAAK |
| | sequence for | |
| | exemplary linker | |
| 127 | amino acid | EAAAKEAAAKEAAAKEAAAKGGGGS |
| | sequence for | |
| | exemplary linker | |
| 128 | amino acid | EAAAKEAAAKEAAAKEAAAKEAAAK |
| | sequence for | |
| | exemplary linker | |
| 129 | amino acid | GTKDSTKDIPETPSKD |
| | sequence for | |
| | exemplary linker | |
| 130 | amino acid | GRDVRQPEVKEEKPES |
| | sequence for | |
| | exemplary linker | |
| 131 | amino acid | EGKSSGSGSESKSTAG |
| | sequence for | |
| | exemplary linker | |
| 132 | amino acid | TPGSPAGSPTSTEEGT |
| | sequence for | |
| | exemplary linker | |
| 133 | amino acid | GSEPATSGSETPGTST |
| | sequence for | |
| | exemplary linker | |
| 134 | Exemplary | GGGAAGCUCAGAAUAAACGCUCAACUUUGGCCGGAUCUGCCACCA |
| | mRNA encoding | UGGAGGCCUCCCCCGCCUCCGGCCCCCGGCACCUGAUGGACCCCC |
| | APOBEC3A- | ACAUCUUCACCUCCAACUUCAACAACGGCAUCGGCCGGCACAAGA |
| | Nme2D16A | CCUACCUGUGCUACGAGGUGGAGCGGCUGGACAACGGCACCUCCG |
| | | UGAAGAUGGACCAGCACCGGGGCUUCCUGCACAACCAGGCCAAGA |
| | | ACCUGCUGUGCGGCUUCUACGGCCGGCACGCCGAGCUGCGGUUCC |
| | | UGGACCUGGUGCCCUCCCUGCAGCUGGACCCCGCCCAGAUCUACC |
| | | GGGUGACCUGGUUCAUCUCCUGGUCCCCCUGCUUCUCCUGGGGCU |
| | | GCGCCGGCGAGGUGCGGGCCUUCCUGCAGGAGAACACCCACGUGC |
| | | GGCUGCGGAUCUUCGCCGCCCGGAUCUACGACUACGACCCCCUGU |
| | | ACAAGGAGGCCCUGCAGAUGCUGCGGGACGCCGGCGCCCAGGUGU |
| | | CCAUCAUGACCUACGACGAGUUCAAGCACUGCUGGGACACCUUCG |
| | | UGGACCACCAGGGCUGCCCCUUCCAGCCCUGGGACGGCCUGGACG |
| | | AGCACUCCCAGGCCCUGUCCGGCCGGCUGCGGGCCAUCCUGCAGA |
| | | ACCAGGGCAACUCCGGCUCCGAGACCCCCGGCACCUCCGAGUCCG |
| | | CCACCCCCGAGUCCGCAGCGUUCAAACCAAAUCCCAUCAACUACA |
| | | UCCUGGGCCUGGCCAUCGGCAUCGCCUCCGUGGGCUGGGCCAUGG |
| | | UGGAGAUCGACGAGGAGGAGAACCCCAUCCGGCUGAUCGACCUG |
| | | GGCGUGCGGGUGUUCGAGCGGGCCGAGGUGCCCAAGACCGGCGAC |
| | | UCCCUGGCCAUGGCCCGGCGGCUGGCCCGGUCCGUGCGGCGGCUG |
| | | ACCCGGCGGCGGGCCCACCGGCUGCUGCGGGCCCGGCGGCUGCUG |
| | | AAGCGGGAGGGCGUGCUGCAGGCCGCCGACUUCGACGAGAACGGC |
| | | CUGAUCAAGUCCCUGCCCAACACCCCCUGGCAGCUGCGGGCCGCC |
| | | GCCCUGGACCGGAAGCUGACCCCCCUGGAGUGGUCCGCCGUGCUG |
| | | CUGCACCUGAUCAAGCACCGGGGCUACCUGUCCCAGCGGAAGAAC |
| | | GAGGGCGAGACCGCCGACAAGGAGCUGGGCGCCCUGCUGAAGGGC |
| | | GUGGCCAACAACGCCCACGCCCUGCAGACCGGCGACUUCCGGACC |
| | | CCCGCCGAGCUGGCCCUGAACAAGUUCGAGAAGGAGUCCGGCCAC |
| | | AUCCGGAACCAGCGGGGCGACUACUCCCACACCUUCUCCCGGAAG |
| | | GACCUGCAGGCCGAGCUGAUCCUGCUGUUCGAGAAGCAGAAGGA |
| | | GUUCGGCAACCCCCACGUGUCCGGCGGCCUGAAGGAGGGCAUCGA |
| | | GACCCUGCUGAUGACCCAGCGGCCCGCCCUGUCCGGCGACGCCGU |
| | | GCAGAAGAUGCUGGGCCACUGCACCUUCGAGCCCGCCGAGCCCAA |
| | | GGCCGCCAAGAACACCUACACCGCCGAGCGGUUCAUCUGGCUGAC |
| | | CAAGCUGAACAACCUGCGGAUCCUGGAGCAGGGCUCCGAGCGGCC |
| | | CCUGACCGACACCGAGCGGGCCACCCUGAUGGACGAGCCCUACCG |
| | | GAAGUCCAAGCUGACCUACGCCCAGGCCCGGAAGCUGCUGGGCCU |
| | | GGAGGACACCGCCUUCUUCAAGGGCCUGCGGUACGGCAAGGACAA |
| | | CGCCGAGGCCUCCACCCUGAUGGAGAUGAAGGCCUACCACGCCAU |
| | | CUCCCGGGCCCUGGAGAAGGAGGGCCUGAAGGACAAGAAGUCCCC |
| | | CCUGAACCUGUCCUCCGAGCUGCAGGACGAGAUCGGCACCGCCUU |
| | | CUCCCUGUUCAAGACCGACGAGGACAUCACCGGCCGGCUGAAGGA |
| | | CCGGGUGCAGCCCGAGAUCCUGGAGGCCCUGCUGAAGCACAUCUC |
| | | CUUCGACAAGUUCGUGCAGAUCUCCCUGAAGGCCCUGCGGCGGAU |
| | | CGUGCCCCUGAUGGAGCAGGGCAAGCGGUACGACGAGGCCUGCGC |
| | | CGAGAUCUACGGCGACCACUACGGCAAGAAGAACACCGAGGAGA |
| | | AGAUCUACCUGCCCCCCAUCCCCGCCGACGAGAUCCGGAACCCCG |
| | | UGGUGCUGCGGGCCCUGUCCCAGGCCCGGAAGGUGAUCAACGGCG |
| | | UGGUGCGGCGGUACGGCUCCCCCGCCCGGAUCCACAUCGAGACCG |
| | | CCCGGGAGGUGGGCAAGUCCUUCAAGGACCGGAAGGAGAUCGAG |
| | | AAGCGGCAGGAGGAGAACCGGAAGGACCGGGAGAAGGCCGCCGC |
| | | CAAGUUCCGGGAGUACUUCCCCAACUUCGUGGGCGAGCCCAAGUC |
| | | CAAGGACAUCCUGAAGCUGCGGCUGUACGAGCAGCAGCACGGCAA |
| | | GUGCCUGUACUCCGGCAAGGAGAUCAACCUGGUGCGGCUGAACG |
| | | AGAAGGGCUACGUGGAGAUCGACCACGCCCUGCCCUUCUCCCGGA |
| | | CCUGGGACGACUCCUUCAACAACAAGGUGCUGGUGCUGGGCUCCG |
| | | AGAACCAGAACAAGGGCAACCAGACCCCCUACGAGUACUUCAACG |
| | | GCAAGGACAACUCCCGGGAGUGGCAGGAGUUCAAGGCCCGGGUG |
| | | GAGACCUCCCGGUUCCCCCGGUCCAAGAAGCAGCGGAUCCUGCUG |
| | | CAGAAGUUCGACGAGGACGGCUUCAAGGAGUGCAACCUGAACGA |
| | | CACCCGGUACGUGAACCGCUUCCUGUGCCAGUUCGUGGCCGACCA |
| | | CAUCCUGCUGACCGGCAAGGGCAAGCGGCGGGUGUUCGCCUCCAA |
| | | CGGCCAGAUCACCAACCUGCUGCGGGGCUUCUGGGGCCUGCGGAA |
| | | GGUGCGGGCCGAGAACGACCGGCACCACGCCCUGGACGCCGUGGU |
| | | GGUGGCCUGCUCCACCGUGGCCAUGCAGCAGAAGAUCACCCGGUU |
| | | CGUGCGGUACAAGGAGAUGAACGCCUUCGACGGCAAGACCAUCG |
| | | ACAAGGAGACCGGCAAGGUGCUGCACCAGAAGACCCACUUCCCCC |
| | | AGCCCUGGGAGUUCUUCGCCCAGGAGGUGAUGAUCCGGGUGUUC |
| | | GGCAAGCCCGACGGCAAGCCCGAGUUCGAGGAGGCCGACACCCCC |
| | | GAGAAGCUGCGGACCCUGCUGGCCGAGAAGCUGUCCUCCCGGCCC |
| | | GAGGCCGUGCACGAGUACGUGACCCCCCUGUUCGUGUCCCGGGCC |
| | | CCCAACCGGAAGAUGUCCGGCGCCCACAAGGACACCCUGCGGUCC |
| | | GCCAAGCGGUUCGUGAAGCACAACGAGAAGAUCUCCGUGAAGCG |
| | | GGUGUGGCUGACCGAGAUCAAGCUGGCCGACCUGGAGAACAUGG |
| | | UGAACUACAAGAACGGCCGGGAGAUCGAGCUGUACGAGGCCCUG |
| | | AAGGCCCGGCUGGAGGCCUACGGCGGCAACGCCAAGCAGGCCUUC |
| | | GACCCCAAGGACAACCCCUUCUACAAGAAGGGCGGCCAGCUGGUG |
| | | AAGGCCGUGCGGGUGGAGAAGACCCAGGAGUCCGGCGUGCUGCU |
| | | GAACAAGAAGAACGCCUACACCAUCGCCGACAACGGCGACAUGGU |
| | | GCGGGUGGACGUGUUCUGCAAGGUGGACAAGAAGGGCAAGAACC |
| | | AGUACUUCAUCGUGCCCAUCUACGCCUGGCAGGUGGCCGAGAACA |
| | | UCCUGCCCGACAUCGACUGCAAGGGCUACCGGAUCGACGACUCCU |
| | | ACACCUUCUGCUUCUCCCUGCACAAGUACGACCUGAUCGCCUUCC |
| | | AGAAGGACGAGAAGUCCAAGGUGGAGUUCGCCUACUACAUCAAC |
| | | UGCGACUCCUCCAACGGCCGGUUCUACCUGGCCUGGCACGACAAG |
| | | GGCUCCAAGGAGCAGCAGUUCCGGAUCUCCACCCAGAACCUGGUG |
| | | CUGAUCCAGAAGUACCAGGUGAACGAGCUGGGCAAGGAGAUCCG |
| | | GCCCUGCCGGCUGAAGAAGCGGCCCCCCGUGCGGUCCGGAAAGCG |
| | | GACCGCCGACGGCUCCGAGUUCGAGUCCCCCAAGAAGAAGCGGAA |
| | | GGUGGAGUAGUGACUAGCACCAGCCUCAAGAACACCCGAAUGGA |
| | | GUCUCUAAGCUACAUAAUACCAACUUACACUUUACAAAAUGUUG |
| | | UCCCCCAAAAUGUAGCCAUUCGUAUCUGCUCCUAAUAAAAAGAA |
| | | AGUUUCUUCACAUUCU |
| 135 | Exemplary open | AUGGAGGCCUCCCCCGCCUCCGGCCCCCGGCACCUGAUGGACCCC |
| | reading frame for | CACAUCUUCACCUCCAACUUCAACAACGGCAUCGGCCGGCACAAG |
| | APOBEC3A- | ACCUACCUGUGCUACGAGGUGGAGCGGCUGGACAACGGCACCUCC |
| | Nme2D16A | GUGAAGAUGGACCAGCACCGGGGCUUCCUGCACAACCAGGCCAAG |
| | | AACCUGCUGUGCGGCUUCUACGGCCGGCACGCCGAGCUGCGGUUC |
| | | CUGGACCUGGUGCCCUCCCUGCAGCUGGACCCCGCCCAGAUCUAC |
| | | CGGGUGACCUGGUUCAUCUCCUGGUCCCCCUGCUUCUCCUGGGGC |
| | | UGCGCCGGCGAGGUGCGGGCCUUCCUGCAGGAGAACACCCACGUG |
| | | CGGCUGCGGAUCUUCGCCGCCCGGAUCUACGACUACGACCCCCUG |
| | | UACAAGGAGGCCCUGCAGAUGCUGCGGGACGCCGGCGCCCAGGUG |
| | | UCCAUCAUGACCUACGACGAGUUCAAGCACUGCUGGGACACCUUC |
| | | GUGGACCACCAGGGCUGCCCCUUCCAGCCCUGGGACGGCCUGGAC |
| | | GAGCACUCCCAGGCCCUGUCCGGCCGGCUGCGGGCCAUCCUGCAG |
| | | AACCAGGGCAACUCCGGCUCCGAGACCCCCGGCACCUCCGAGUCC |
| | | GCCACCCCCGAGUCCGCAGCGUUCAAACCAAAUCCCAUCAACUAC |
| | | AUCCUGGGCCUGGCCAUCGGCAUCGCCUCCGUGGGCUGGGCCAUG |
| | | GUGGAGAUCGACGAGGAGGAGAACCCCAUCCGGCUGAUCGACCU |
| | | GGGCGUGCGGGUGUUCGAGCGGGCCGAGGUGCCCAAGACCGGCG |
| | | ACUCCCUGGCCAUGGCCCGGCGGCUGGCCCGGUCCGUGCGGCGGC |
| | | UGACCCGGCGGCGGGCCCACCGGCUGCUGCGGGCCCGGCGGCUGC |
| | | UGAAGCGGGAGGGCGUGCUGCAGGCCGCCGACUUCGACGAGAAC |
| | | GGCCUGAUCAAGUCCCUGCCCAACACCCCCUGGCAGCUGCGGGCC |
| | | GCCGCCCUGGACCGGAAGCUGACCCCCCUGGAGUGGUCCGCCGUG |
| | | CUGCUGCACCUGAUCAAGCACCGGGGCUACCUGUCCCAGCGGAAG |
| | | AACGAGGGCGAGACCGCCGACAAGGAGCUGGGCGCCCUGCUGAAG |
| | | GGCGUGGCCAACAACGCCCACGCCCUGCAGACCGGCGACUUCCGG |
| | | ACCCCCGCCGAGCUGGCCCUGAACAAGUUCGAGAAGGAGUCCGGC |
| | | CACAUCCGGAACCAGCGGGGCGACUACUCCCACACCUUCUCCCGG |
| | | AAGGACCUGCAGGCCGAGCUGAUCCUGCUGUUCGAGAAGCAGAA |
| | | GGAGUUCGGCAACCCCCACGUGUCCGGCGGCCUGAAGGAGGGCAU |
| | | CGAGACCCUGCUGAUGACCCAGCGGCCCGCCCUGUCCGGCGACGC |
| | | CGUGCAGAAGAUGCUGGGCCACUGCACCUUCGAGCCCGCCGAGCC |
| | | CAAGGCCGCCAAGAACACCUACACCGCCGAGCGGUUCAUCUGGCU |
| | | GACCAAGCUGAACAACCUGCGGAUCCUGGAGCAGGGCUCCGAGCG |
| | | GCCCCUGACCGACACCGAGCGGGCCACCCUGAUGGACGAGCCCUA |
| | | CCGGAAGUCCAAGCUGACCUACGCCCAGGCCCGGAAGCUGCUGGG |
| | | CCUGGAGGACACCGCCUUCUUCAAGGGCCUGCGGUACGGCAAGGA |
| | | CAACGCCGAGGCCUCCACCCUGAUGGAGAUGAAGGCCUACCACGC |
| | | CAUCUCCCGGGCCCUGGAGAAGGAGGGCCUGAAGGACAAGAAGU |
| | | CCCCCCUGAACCUGUCCUCCGAGCUGCAGGACGAGAUCGGCACCG |
| | | CCUUCUCCCUGUUCAAGACCGACGAGGACAUCACCGGCCGGCUGA |
| | | AGGACCGGGUGCAGCCCGAGAUCCUGGAGGCCCUGCUGAAGCACA |
| | | UCUCCUUCGACAAGUUCGUGCAGAUCUCCCUGAAGGCCCUGCGGC |
| | | GGAUCGUGCCCCUGAUGGAGCAGGGCAAGCGGUACGACGAGGCC |
| | | UGCGCCGAGAUCUACGGCGACCACUACGGCAAGAAGAACACCGAG |
| | | GAGAAGAUCUACCUGCCCCCCAUCCCCGCCGACGAGAUCCGGAAC |
| | | CCCGUGGUGCUGCGGGCCCUGUCCCAGGCCCGGAAGGUGAUCAAC |
| | | GGCGUGGUGCGGCGGUACGGCUCCCCCGCCCGGAUCCACAUCGAG |
| | | ACCGCCCGGGAGGUGGGCAAGUCCUUCAAGGACCGGAAGGAGAU |
| | | CGAGAAGCGGCAGGAGGAGAACCGGAAGGACCGGGAGAAGGCCG |
| | | CCGCCAAGUUCCGGGAGUACUUCCCCAACUUCGUGGGCGAGCCCA |
| | | AGUCCAAGGACAUCCUGAAGCUGCGGCUGUACGAGCAGCAGCACG |
| | | GCAAGUGCCUGUACUCCGGCAAGGAGAUCAACCUGGUGCGGCUG |
| | | AACGAGAAGGGCUACGUGGAGAUCGACCACGCCCUGCCCUUCUCC |
| | | CGGACCUGGGACGACUCCUUCAACAACAAGGUGCUGGUGCUGGGC |
| | | UCCGAGAACCAGAACAAGGGCAACCAGACCCCCUACGAGUACUUC |
| | | AACGGCAAGGACAACUCCCGGGAGUGGCAGGAGUUCAAGGCCCG |
| | | GGUGGAGACCUCCCGGUUCCCCCGGUCCAAGAAGCAGCGGAUCCU |
| | | GCUGCAGAAGUUCGACGAGGACGGCUUCAAGGAGUGCAACCUGA |
| | | ACGACACCCGGUACGUGAACCGCUUCCUGUGCCAGUUCGUGGCCG |
| | | ACCACAUCCUGCUGACCGGCAAGGGCAAGCGGCGGGUGUUCGCCU |
| | | CCAACGGCCAGAUCACCAACCUGCUGCGGGGCUUCUGGGGCCUGC |
| | | GGAAGGUGCGGGCCGAGAACGACCGGCACCACGCCCUGGACGCCG |
| | | UGGUGGUGGCCUGCUCCACCGUGGCCAUGCAGCAGAAGAUCACCC |
| | | GGUUCGUGCGGUACAAGGAGAUGAACGCCUUCGACGGCAAGACC |
| | | AUCGACAAGGAGACCGGCAAGGUGCUGCACCAGAAGACCCACUUC |
| | | CCCCAGCCCUGGGAGUUCUUCGCCCAGGAGGUGAUGAUCCGGGUG |
| | | UUCGGCAAGCCCGACGGCAAGCCCGAGUUCGAGGAGGCCGACACC |
| | | CCCGAGAAGCUGCGGACCCUGCUGGCCGAGAAGCUGUCCUCCCGG |
| | | CCCGAGGCCGUGCACGAGUACGUGACCCCCCUGUUCGUGUCCCGG |
| | | GCCCCCAACCGGAAGAUGUCCGGCGCCCACAAGGACACCCUGCGG |
| | | UCCGCCAAGCGGUUCGUGAAGCACAACGAGAAGAUCUCCGUGAA |
| | | GCGGGUGUGGCUGACCGAGAUCAAGCUGGCCGACCUGGAGAACA |
| | | UGGUGAACUACAAGAACGGCCGGGAGAUCGAGCUGUACGAGGCC |
| | | CUGAAGGCCCGGCUGGAGGCCUACGGCGGCAACGCCAAGCAGGCC |
| | | UUCGACCCCAAGGACAACCCCUUCUACAAGAAGGGCGGCCAGCUG |
| | | GUGAAGGCCGUGCGGGUGGAGAAGACCCAGGAGUCCGGCGUGCU |
| | | GCUGAACAAGAAGAACGCCUACACCAUCGCCGACAACGGCGACAU |
| | | GGUGCGGGUGGACGUGUUCUGCAAGGUGGACAAGAAGGGCAAGA |
| | | ACCAGUACUUCAUCGUGCCCAUCUACGCCUGGCAGGUGGCCGAGA |
| | | ACAUCCUGCCCGACAUCGACUGCAAGGGCUACCGGAUCGACGACU |
| | | CCUACACCUUCUGCUUCUCCCUGCACAAGUACGACCUGAUCGCCU |
| | | UCCAGAAGGACGAGAAGUCCAAGGUGGAGUUCGCCUACUACAUC |
| | | AACUGCGACUCCUCCAACGGCCGGUUCUACCUGGCCUGGCACGAC |
| | | AAGGGCUCCAAGGAGCAGCAGUUCCGGAUCUCCACCCAGAACCUG |
| | | GUGCUGAUCCAGAAGUACCAGGUGAACGAGCUGGGCAAGGAGAU |
| | | CCGGCCCUGCCGGCUGAAGAAGCGGCCCCCCGUGCGGUCCGGAAA |
| | | GCGGACCGCCGACGGCUCCGAGUUCGAGUCCCCCAAGAAGAAGCG |
| | | GAAGGUGGAGUAG |
| 136 | Exemplary amino | MEASPASGPRHLMDPHIFTSNFNNGIGRHKTYLCYEVERLDNGTSVKM |
| | acid sequence for | DQHRGFLHNQAKNLLCGFYGRHAELRFLDLVPSLQLDPAQIYRVTWFI |
| | APOBEC3A- | SWSPCFSWGCAGEVRAFLQENTHVRLRIFAARIYDYDPLYKEALQMLR |
| | Nme2D16A | DAGAQVSIMTYDEFKHCWDTFVDHQGCPFQPWDGLDEHSQALSGRL |
| | | RAILQNQGNSGSETPGTSESATPESAAFKPNPINYILGLAIGIASVGWAM |
| | | VEIDEEENPIRLIDLGVRVFERAEVPKTGDSLAMARRLARSVRRLTRRR |
| | | AHRLLRARRLLKREGVLQAADFDENGLIKSLPNTPWQLRAAALDRKL |
| | | TPLEWSAVLLHLIKHRGYLSQRKNEGETADKELGALLKGVANNAHAL |
| | | QTGDFRTPAELALNKFEKESGHIRNQRGDYSHTFSRKDLQAELILLFEK |
| | | QKEFGNPHVSGGLKEGIETLLMTQRPALSGDAVQKMLGHCTFEPAEPK |
| | | AAKNTYTAERFIWLTKLNNLRILEQGSERPLTDTERATLMDEPYRKSK |
| | | LTYAQARKLLGLEDTAFFKGLRYGKDNAEASTLMEMKAYHAISRALE |
| | | KEGLKDKKSPLNLSSELQDEIGTAFSLFKTDEDITGRLKDRVQPEILEAL |
| | | LKHISFDKFVQISLKALRRIVPLMEQGKRYDEACAEIYGDHYGKKNTE |
| | | EKIYLPPIPADEIRNPVVLRALSQARKVINGVVRRYGSPARIHIETAREV |
| | | GKSFKDRKEIEKRQEENRKDREKAAAKFREYFPNFVGEPKSKDILKLR |
| | | LYEQQHGKCLYSGKEINLVRLNEKGYVEIDHALPFSRTWDDSFNNKVL |
| | | VLGSENQNKGNQTPYEYFNGKDNSREWQEFKARVETSRFPRSKKQRIL |
| | | LQKFDEDGFKECNLNDTRYVNRFLCQFVADHILLTGKGKRRVFASNG |
| | | QITNLLRGFWGLRKVRAENDRHHALDAVVVACSTVAMQQKITRFVRY |
| | | KEMNAFDGKTIDKETGKVLHQKTHFPQPWEFFAQEVMIRVFGKPDGK |
| | | PEFEEADTPEKLRTLLAEKLSSRPEAVHEYVTPLFVSRAPNRKMSGAH |
| | | KDTLRSAKRFVKHNEKISVKRVWLTEIKLADLENMVNYKNGREIELYE |
| | | ALKARLEAYGGNAKQAFDPKDNPFYKKGGQLVKAVRVEKTQESGVL |
| | | LNKKNAYTIADNGDMVRVDVFCKVDKKGKNQYFIVPIYAWQVAENIL |
| | | PDIDCKGYRIDDSYTFCFSLHKYDLIAFQKDEKSKVEFAYYINCDSSNG |
| | | RFYLAWHDKGSKEQQFRISTQNLVLIQKYQVNELGKEIRPCRLKKRPP |
| | | VRSGKRTADGSEFESPKKKRKVE* |
| 137 | Exemplary | GGGAAGCUCAGAAUAAACGCUCAACUUUGGCCGGAUCUGCCACCA |
| | mRNA encoding | UGGACGGCUCCGGCGGCGGCUCCCCCAAGAAGAAGCGGAAGGUGG |
| | APOBEC3A- | AGGACAAGCGGCCCGCCGCCACCAAGAAGGCCGGCCAGGCCAAGA |
| | Nme2D16A | AGAAGAAGGGCGGCUCCGGCGGCGGCGAGGCCUCCCCCGCCUCCG |
| | | GCCCCCGGCACCUGAUGGACCCCCACAUCUUCACCUCCAACUUCA |
| | | ACAACGGCAUCGGCCGGCACAAGACCUACCUGUGCUACGAGGUGG |
| | | AGCGGCUGGACAACGGCACCUCCGUGAAGAUGGACCAGCACCGGG |
| | | GCUUCCUGCACAACCAGGCCAAGAACCUGCUGUGCGGCUUCUACG |
| | | GCCGGCACGCCGAGCUGCGGUUCCUGGACCUGGUGCCCUCCCUGC |
| | | AGCUGGACCCCGCCCAGAUCUACCGGGUGACCUGGUUCAUCUCCU |
| | | GGUCCCCCUGCUUCUCCUGGGGCUGCGCCGGCGAGGUGCGGGCCU |
| | | UCCUGCAGGAGAACACCCACGUGCGGCUGCGGAUCUUCGCCGCCC |
| | | GGAUCUACGACUACGACCCCCUGUACAAGGAGGCCCUGCAGAUGC |
| | | UGCGGGACGCCGGCGCCCAGGUGUCCAUCAUGACCUACGACGAGU |
| | | UCAAGCACUGCUGGGACACCUUCGUGGACCACCAGGGCUGCCCCU |
| | | UCCAGCCCUGGGACGGCCUGGACGAGCACUCCCAGGCCCUGUCCG |
| | | GCCGGCUGCGGGCCAUCCUGCAGAACCAGGGCAACUCCGGCUCCG |
| | | AGACCCCCGGCACCUCCGAGUCCGCCACCCCCGAGUCCGCAGCGU |
| | | UCAAACCAAAUCCCAUCAACUACAUCCUGGGCCUGGCCAUCGGCA |
| | | UCGCCUCCGUGGGCUGGGCCAUGGUGGAGAUCGACGAGGAGGAG |
| | | AACCCCAUCCGGCUGAUCGACCUGGGCGUGCGGGUGUUCGAGCGG |
| | | GCCGAGGUGCCCAAGACCGGCGACUCCCUGGCCAUGGCCCGGCGG |
| | | CUGGCCCGGUCCGUGCGGCGGCUGACCCGGCGGCGGGCCCACCGG |
| | | CUGCUGCGGGCCCGGCGGCUGCUGAAGCGGGAGGGCGUGCUGCAG |
| | | GCCGCCGACUUCGACGAGAACGGCCUGAUCAAGUCCCUGCCCAAC |
| | | ACCCCCUGGCAGCUGCGGGCCGCCGCCCUGGACCGGAAGCUGACC |
| | | CCCCUGGAGUGGUCCGCCGUGCUGCUGCACCUGAUCAAGCACCGG |
| | | GGCUACCUGUCCCAGCGGAAGAACGAGGGCGAGACCGCCGACAAG |
| | | GAGCUGGGCGCCCUGCUGAAGGGCGUGGCCAACAACGCCCACGCC |
| | | CUGCAGACCGGCGACUUCCGGACCCCCGCCGAGCUGGCCCUGAAC |
| | | AAGUUCGAGAAGGAGUCCGGCCACAUCCGGAACCAGCGGGGCGAC |
| | | UACUCCCACACCUUCUCCCGGAAGGACCUGCAGGCCGAGCUGAUC |
| | | CUGCUGUUCGAGAAGCAGAAGGAGUUCGGCAACCCCCACGUGUCC |
| | | GGCGGCCUGAAGGAGGGCAUCGAGACCCUGCUGAUGACCCAGCGG |
| | | CCCGCCCUGUCCGGCGACGCCGUGCAGAAGAUGCUGGGCCACUGC |
| | | ACCUUCGAGCCCGCCGAGCCCAAGGCCGCCAAGAACACCUACACC |
| | | GCCGAGCGGUUCAUCUGGCUGACCAAGCUGAACAACCUGCGGAUC |
| | | CUGGAGCAGGGCUCCGAGCGGCCCCUGACCGACACCGAGCGGGCC |
| | | ACCCUGAUGGACGAGCCCUACCGGAAGUCCAAGCUGACCUACGCC |
| | | CAGGCCCGGAAGCUGCUGGGCCUGGAGGACACCGCCUUCUUCAAG |
| | | GGCCUGCGGUACGGCAAGGACAACGCCGAGGCCUCCACCCUGAUG |
| | | GAGAUGAAGGCCUACCACGCCAUCUCCCGGGCCCUGGAGAAGGAG |
| | | GGCCUGAAGGACAAGAAGUCCCCCCUGAACCUGUCCUCCGAGCUG |
| | | CAGGACGAGAUCGGCACCGCCUUCUCCCUGUUCAAGACCGACGAG |
| | | GACAUCACCGGCCGGCUGAAGGACCGGGUGCAGCCCGAGAUCCUG |
| | | GAGGCCCUGCUGAAGCACAUCUCCUUCGACAAGUUCGUGCAGAUC |
| | | UCCCUGAAGGCCCUGCGGCGGAUCGUGCCCCUGAUGGAGCAGGGC |
| | | AAGCGGUACGACGAGGCCUGCGCCGAGAUCUACGGCGACCACUAC |
| | | GGCAAGAAGAACACCGAGGAGAAGAUCUACCUGCCCCCCAUCCCC |
| | | GCCGACGAGAUCCGGAACCCCGUGGUGCUGCGGGCCCUGUCCCAG |
| | | GCCCGGAAGGUGAUCAACGGCGUGGUGCGGCGGUACGGCUCCCCC |
| | | GCCCGGAUCCACAUCGAGACCGCCCGGGAGGUGGGCAAGUCCUUC |
| | | AAGGACCGGAAGGAGAUCGAGAAGCGGCAGGAGGAGAACCGGAA |
| | | GGACCGGGAGAAGGCCGCCGCCAAGUUCCGGGAGUACUUCCCCAA |
| | | CUUCGUGGGCGAGCCCAAGUCCAAGGACAUCCUGAAGCUGCGGCU |
| | | GUACGAGCAGCAGCACGGCAAGUGCCUGUACUCCGGCAAGGAGA |
| | | UCAACCUGGUGCGGCUGAACGAGAAGGGCUACGUGGAGAUCGAC |
| | | CACGCCCUGCCCUUCUCCCGGACCUGGGACGACUCCUUCAACAAC |
| | | AAGGUGCUGGUGCUGGGCUCCGAGAACCAGAACAAGGGCAACCA |
| | | GACCCCCUACGAGUACUUCAACGGCAAGGACAACUCCCGGGAGUG |
| | | GCAGGAGUUCAAGGCCCGGGUGGAGACCUCCCGGUUCCCCCGGUC |
| | | CAAGAAGCAGCGGAUCCUGCUGCAGAAGUUCGACGAGGACGGCU |
| | | UCAAGGAGUGCAACCUGAACGACACCCGGUACGUGAACCGCUUCC |
| | | UGUGCCAGUUCGUGGCCGACCACAUCCUGCUGACCGGCAAGGGCA |
| | | AGCGGCGGGUGUUCGCCUCCAACGGCCAGAUCACCAACCUGCUGC |
| | | GGGGCUUCUGGGGCCUGCGGAAGGUGCGGGCCGAGAACGACCGG |
| | | CACCACGCCCUGGACGCCGUGGUGGUGGCCUGCUCCACCGUGGCC |
| | | AUGCAGCAGAAGAUCACCCGGUUCGUGCGGUACAAGGAGAUGAA |
| | | CGCCUUCGACGGCAAGACCAUCGACAAGGAGACCGGCAAGGUGCU |
| | | GCACCAGAAGACCCACUUCCCCCAGCCCUGGGAGUUCUUCGCCCA |
| | | GGAGGUGAUGAUCCGGGUGUUCGGCAAGCCCGACGGCAAGCCCG |
| | | AGUUCGAGGAGGCCGACACCCCCGAGAAGCUGCGGACCCUGCUGG |
| | | CCGAGAAGCUGUCCUCCCGGCCCGAGGCCGUGCACGAGUACGUGA |
| | | CCCCCCUGUUCGUGUCCCGGGCCCCCAACCGGAAGAUGUCCGGCG |
| | | CCCACAAGGACACCCUGCGGUCCGCCAAGCGGUUCGUGAAGCACA |
| | | ACGAGAAGAUCUCCGUGAAGCGGGUGUGGCUGACCGAGAUCAAG |
| | | CUGGCCGACCUGGAGAACAUGGUGAACUACAAGAACGGCCGGGA |
| | | GAUCGAGCUGUACGAGGCCCUGAAGGCCCGGCUGGAGGCCUACGG |
| | | CGGCAACGCCAAGCAGGCCUUCGACCCCAAGGACAACCCCUUCUA |
| | | CAAGAAGGGCGGCCAGCUGGUGAAGGCCGUGCGGGUGGAGAAGA |
| | | CCCAGGAGUCCGGCGUGCUGCUGAACAAGAAGAACGCCUACACCA |
| | | UCGCCGACAACGGCGACAUGGUGCGGGUGGACGUGUUCUGCAAG |
| | | GUGGACAAGAAGGGCAAGAACCAGUACUUCAUCGUGCCCAUCUA |
| | | CGCCUGGCAGGUGGCCGAGAACAUCCUGCCCGACAUCGACUGCAA |
| | | GGGCUACCGGAUCGACGACUCCUACACCUUCUGCUUCUCCCUGCA |
| | | CAAGUACGACCUGAUCGCCUUCCAGAAGGACGAGAAGUCCAAGG |
| | | UGGAGUUCGCCUACUACAUCAACUGCGACUCCUCCAACGGCCGGU |
| | | UCUACCUGGCCUGGCACGACAAGGGCUCCAAGGAGCAGCAGUUCC |
| | | GGAUCUCCACCCAGAACCUGGUGCUGAUCCAGAAGUACCAGGUGA |
| | | ACGAGCUGGGCAAGGAGAUCCGGCCCUGCCGGCUGAAGAAGCGGC |
| | | CCCCCGUGCGGUCCGGAAAGCGGACCGCCGACGGCUCCGAGUUCG |
| | | AGUCCCCCAAGAAGAAGCGGAAGGUGGAGUAGUGACUAGCACCA |
| | | GCCUCAAGAACACCCGAAUGGAGUCUCUAAGCUACAUAAUACCAA |
| | | CUUACACUUUACAAAAUGUUGUCCCCCAAAAUGUAGCCAUUCGU |
| | | AUCUGCUCCUAAUAAAAAGAAAGUUUCUUCACAUUCU |
| 138 | Exemplary open | AUGGACGGCUCCGGCGGCGGCUCCCCCAAGAAGAAGCGGAAGGUG |
| | reading frame for | GAGGACAAGCGGCCCGCCGCCACCAAGAAGGCCGGCCAGGCCAAG |
| | APOBEC3A- | AAGAAGAAGGGCGGCUCCGGCGGCGGCGAGGCCUCCCCCGCCUCC |
| | Nme2D16A | GGCCCCCGGCACCUGAUGGACCCCCACAUCUUCACCUCCAACUUC |
| | | AACAACGGCAUCGGCCGGCACAAGACCUACCUGUGCUACGAGGUG |
| | | GAGCGGCUGGACAACGGCACCUCCGUGAAGAUGGACCAGCACCGG |
| | | GGCUUCCUGCACAACCAGGCCAAGAACCUGCUGUGCGGCUUCUAC |
| | | GGCCGGCACGCCGAGCUGCGGUUCCUGGACCUGGUGCCCUCCCUG |
| | | CAGCUGGACCCCGCCCAGAUCUACCGGGUGACCUGGUUCAUCUCC |
| | | UGGUCCCCCUGCUUCUCCUGGGGCUGCGCCGGCGAGGUGCGGGCC |
| | | UUCCUGCAGGAGAACACCCACGUGCGGCUGCGGAUCUUCGCCGCC |
| | | CGGAUCUACGACUACGACCCCCUGUACAAGGAGGCCCUGCAGAUG |
| | | CUGCGGGACGCCGGCGCCCAGGUGUCCAUCAUGACCUACGACGAG |
| | | UUCAAGCACUGCUGGGACACCUUCGUGGACCACCAGGGCUGCCCC |
| | | UUCCAGCCCUGGGACGGCCUGGACGAGCACUCCCAGGCCCUGUCC |
| | | GGCCGGCUGCGGGCCAUCCUGCAGAACCAGGGCAACUCCGGCUCC |
| | | GAGACCCCCGGCACCUCCGAGUCCGCCACCCCCGAGUCCGCAGCG |
| | | UUCAAACCAAAUCCCAUCAACUACAUCCUGGGCCUGGCCAUCGGC |
| | | AUCGCCUCCGUGGGCUGGGCCAUGGUGGAGAUCGACGAGGAGGA |
| | | GAACCCCAUCCGGCUGAUCGACCUGGGCGUGCGGGUGUUCGAGCG |
| | | GGCCGAGGUGCCCAAGACCGGCGACUCCCUGGCCAUGGCCCGGCG |
| | | GCUGGCCCGGUCCGUGCGGCGGCUGACCCGGCGGCGGGCCCACCG |
| | | GCUGCUGCGGGCCCGGCGGCUGCUGAAGCGGGAGGGCGUGCUGCA |
| | | GGCCGCCGACUUCGACGAGAACGGCCUGAUCAAGUCCCUGCCCAA |
| | | CACCCCCUGGCAGCUGCGGGCCGCCGCCCUGGACCGGAAGCUGAC |
| | | CCCCCUGGAGUGGUCCGCCGUGCUGCUGCACCUGAUCAAGCACCG |
| | | GGGCUACCUGUCCCAGCGGAAGAACGAGGGCGAGACCGCCGACAA |
| | | GGAGCUGGGCGCCCUGCUGAAGGGCGUGGCCAACAACGCCCACGC |
| | | CCUGCAGACCGGCGACUUCCGGACCCCCGCCGAGCUGGCCCUGAA |
| | | CAAGUUCGAGAAGGAGUCCGGCCACAUCCGGAACCAGCGGGGCGA |
| | | CUACUCCCACACCUUCUCCCGGAAGGACCUGCAGGCCGAGCUGAU |
| | | CCUGCUGUUCGAGAAGCAGAAGGAGUUCGGCAACCCCCACGUGUC |
| | | CGGCGGCCUGAAGGAGGGCAUCGAGACCCUGCUGAUGACCCAGCG |
| | | GCCCGCCCUGUCCGGCGACGCCGUGCAGAAGAUGCUGGGCCACUG |
| | | CACCUUCGAGCCCGCCGAGCCCAAGGCCGCCAAGAACACCUACAC |
| | | CGCCGAGCGGUUCAUCUGGCUGACCAAGCUGAACAACCUGCGGAU |
| | | CCUGGAGCAGGGCUCCGAGCGGCCCCUGACCGACACCGAGCGGGC |
| | | CACCCUGAUGGACGAGCCCUACCGGAAGUCCAAGCUGACCUACGC |
| | | CCAGGCCCGGAAGCUGCUGGGCCUGGAGGACACCGCCUUCUUCAA |
| | | GGGCCUGCGGUACGGCAAGGACAACGCCGAGGCCUCCACCCUGAU |
| | | GGAGAUGAAGGCCUACCACGCCAUCUCCCGGGCCCUGGAGAAGGA |
| | | GGGCCUGAAGGACAAGAAGUCCCCCCUGAACCUGUCCUCCGAGCU |
| | | GCAGGACGAGAUCGGCACCGCCUUCUCCCUGUUCAAGACCGACGA |
| | | GGACAUCACCGGCCGGCUGAAGGACCGGGUGCAGCCCGAGAUCCU |
| | | GGAGGCCCUGCUGAAGCACAUCUCCUUCGACAAGUUCGUGCAGAU |
| | | CUCCCUGAAGGCCCUGCGGCGGAUCGUGCCCCUGAUGGAGCAGGG |
| | | CAAGCGGUACGACGAGGCCUGCGCCGAGAUCUACGGCGACCACUA |
| | | CGGCAAGAAGAACACCGAGGAGAAGAUCUACCUGCCCCCCAUCCC |
| | | CGCCGACGAGAUCCGGAACCCCGUGGUGCUGCGGGCCCUGUCCCA |
| | | GGCCCGGAAGGUGAUCAACGGCGUGGUGCGGCGGUACGGCUCCCC |
| | | CGCCCGGAUCCACAUCGAGACCGCCCGGGAGGUGGGCAAGUCCUU |
| | | CAAGGACCGGAAGGAGAUCGAGAAGCGGCAGGAGGAGAACCGGA |
| | | AGGACCGGGAGAAGGCCGCCGCCAAGUUCCGGGAGUACUUCCCCA |
| | | ACUUCGUGGGCGAGCCCAAGUCCAAGGACAUCCUGAAGCUGCGGC |
| | | UGUACGAGCAGCAGCACGGCAAGUGCCUGUACUCCGGCAAGGAG |
| | | AUCAACCUGGUGCGGCUGAACGAGAAGGGCUACGUGGAGAUCGA |
| | | CCACGCCCUGCCCUUCUCCCGGACCUGGGACGACUCCUUCAACAA |
| | | CAAGGUGCUGGUGCUGGGCUCCGAGAACCAGAACAAGGGCAACC |
| | | AGACCCCCUACGAGUACUUCAACGGCAAGGACAACUCCCGGGAGU |
| | | GGCAGGAGUUCAAGGCCCGGGUGGAGACCUCCCGGUUCCCCCGGU |
| | | CCAAGAAGCAGCGGAUCCUGCUGCAGAAGUUCGACGAGGACGGC |
| | | UUCAAGGAGUGCAACCUGAACGACACCCGGUACGUGAACCGCUUC |
| | | CUGUGCCAGUUCGUGGCCGACCACAUCCUGCUGACCGGCAAGGGC |
| | | AAGCGGCGGGUGUUCGCCUCCAACGGCCAGAUCACCAACCUGCUG |
| | | CGGGGCUUCUGGGGCCUGCGGAAGGUGCGGGCCGAGAACGACCG |
| | | GCACCACGCCCUGGACGCCGUGGUGGUGGCCUGCUCCACCGUGGC |
| | | CAUGCAGCAGAAGAUCACCCGGUUCGUGCGGUACAAGGAGAUGA |
| | | ACGCCUUCGACGGCAAGACCAUCGACAAGGAGACCGGCAAGGUGC |
| | | UGCACCAGAAGACCCACUUCCCCCAGCCCUGGGAGUUCUUCGCCC |
| | | AGGAGGUGAUGAUCCGGGUGUUCGGCAAGCCCGACGGCAAGCCC |
| | | GAGUUCGAGGAGGCCGACACCCCCGAGAAGCUGCGGACCCUGCUG |
| | | GCCGAGAAGCUGUCCUCCCGGCCCGAGGCCGUGCACGAGUACGUG |
| | | ACCCCCCUGUUCGUGUCCCGGGCCCCCAACCGGAAGAUGUCCGGC |
| | | GCCCACAAGGACACCCUGCGGUCCGCCAAGCGGUUCGUGAAGCAC |
| | | AACGAGAAGAUCUCCGUGAAGCGGGUGUGGCUGACCGAGAUCAA |
| | | GCUGGCCGACCUGGAGAACAUGGUGAACUACAAGAACGGCCGGG |
| | | AGAUCGAGCUGUACGAGGCCCUGAAGGCCCGGCUGGAGGCCUACG |
| | | GCGGCAACGCCAAGCAGGCCUUCGACCCCAAGGACAACCCCUUCU |
| | | ACAAGAAGGGCGGCCAGCUGGUGAAGGCCGUGCGGGUGGAGAAG |
| | | ACCCAGGAGUCCGGCGUGCUGCUGAACAAGAAGAACGCCUACACC |
| | | AUCGCCGACAACGGCGACAUGGUGCGGGUGGACGUGUUCUGCAA |
| | | GGUGGACAAGAAGGGCAAGAACCAGUACUUCAUCGUGCCCAUCU |
| | | ACGCCUGGCAGGUGGCCGAGAACAUCCUGCCCGACAUCGACUGCA |
| | | AGGGCUACCGGAUCGACGACUCCUACACCUUCUGCUUCUCCCUGC |
| | | ACAAGUACGACCUGAUCGCCUUCCAGAAGGACGAGAAGUCCAAG |
| | | GUGGAGUUCGCCUACUACAUCAACUGCGACUCCUCCAACGGCCGG |
| | | UUCUACCUGGCCUGGCACGACAAGGGCUCCAAGGAGCAGCAGUUC |
| | | CGGAUCUCCACCCAGAACCUGGUGCUGAUCCAGAAGUACCAGGUG |
| | | AACGAGCUGGGCAAGGAGAUCCGGCCCUGCCGGCUGAAGAAGCG |
| | | GCCCCCCGUGCGGUCCGGAAAGCGGACCGCCGACGGCUCCGAGUU |
| | | CGAGUCCCCCAAGAAGAAGCGGAAGGUGGAGUAG |
| 139 | Exemplary amino | MDGSGGGSPKKKRKVEDKRPAATKKAGQAKKKKGGSGGGEASPASG |
| | acid sequence for | PRHLMDPHIFTSNFNNGIGRHKTYLCYEVERLDNGTSVKMDQHRGFLH |
| | APOBEC3A- | NQAKNLLCGFYGRHAELRFLDLVPSLQLDPAQIYRVTWFISWSPCFSW |
| | Nme2D16A | GCAGEVRAFLQENTHVRLRIFAARIYDYDPLYKEALQMLRDAGAQVSI |
| | | MTYDEFKHCWDTFVDHQGCPFQPWDGLDEHSQALSGRLRAILQNQG |
| | | NSGSETPGTSESATPESAAFKPNPINYILGLAIGIASVGWAMVEIDEEEN |
| | | PIRLIDLGVRVFERAEVPKTGDSLAMARRLARSVRRLTRRRAHRLLRA |
| | | RRLLKREGVLQAADFDENGLIKSLPNTPWQLRAAALDRKLTPLEWSA |
| | | VLLHLIKHRGYLSQRKNEGETADKELGALLKGVANNAHALQTGDFRT |
| | | PAELALNKFEKESGHIRNQRGDYSHTFSRKDLQAELILLFEKQKEFGNP |
| | | HVSGGLKEGIETLLMTQRPALSGDAVQKMLGHCTFEPAEPKAAKNTY |
| | | TAERFIWLTKLNNLRILEQGSERPLTDTERATLMDEPYRKSKLTYAQA |
| | | RKLLGLEDTAFFKGLRYGKDNAEASTLMEMKAYHAISRALEKEGLKD |
| | | KKSPLNLSSELQDEIGTAFSLFKTDEDITGRLKDRVQPEILEALLKHISFD |
| | | KFVQISLKALRRIVPLMEQGKRYDEACAEIYGDHYGKKNTEEKIYLPPI |
| | | PADEIRNPVVLRALSQARKVINGVVRRYGSPARIHIETAREVGKSFKDR |
| | | KEIEKRQEENRKDREKAAAKFREYFPNFVGEPKSKDILKLRLYEQQHG |
| | | KCLYSGKEINLVRLNEKGYVEIDHALPFSRTWDDSFNNKVLVLGSENQ |
| | | NKGNQTPYEYFNGKDNSREWQEFKARVETSRFPRSKKQRILLQKFDED |
| | | GFKECNLNDTRYVNRFLCQFVADHILLTGKGKRRVFASNGQITNLLRG |
| | | FWGLRKVRAENDRHHALDAVVVACSTVAMQQKITRFVRYKEMNAFD |
| | | GKTIDKETGKVLHQKTHFPQPWEFFAQEVMIRVFGKPDGKPEFEEADT |
| | | PEKLRTLLAEKLSSRPEAVHEYVTPLFVSRAPNRKMSGAHKDTLRSAK |
| | | RFVKHNEKISVKRVWLTEIKLADLENMVNYKNGREIELYEALKARLEA |
| | | YGGNAKQAFDPKDNPFYKKGGQLVKAVRVEKTQESGVLLNKKNAYT |
| | | IADNGDMVRVDVFCKVDKKGKNQYFIVPIYAWQVAENILPDIDCKGY |
| | | RIDDSYTFCFSLHKYDLIAFQKDEKSKVEFAYYINCDSSNGRFYLAWH |
| | | DKGSKEQQFRISTQNLVLIQKYQVNELGKEIRPCRLKKRPPVRSGKRTA |
| | | DGSEFESPKKKRKVE* |
| 140 | Exemplary | GGGAAGCUCAGAAUAAACGCUCAACUUUGGCCGGAUCUGCCACCA |
| | mRNA encoding | UGGACGGCUCCGGCGGCGGCUCCCCCAAGAAGAAGCGGAAGGUGG |
| | APOBEC3A- | AGGACAAGCGGCCCGCCGCCACCAAGAAGGCCGGCCAGGCCAAGA |
| | Nme2D16A | AGAAGAAGGGCGGCUCCGGCGGCGGCGAGGCCUCCCCCGCCUCCG |
| | | GCCCCCGGCACCUGAUGGACCCCCACAUCUUCACCUCCAACUUCA |
| | | ACAACGGCAUCGGCCGGCACAAGACCUACCUGUGCUACGAGGUGG |
| | | AGCGGCUGGACAACGGCACCUCCGUGAAGAUGGACCAGCACCGGG |
| | | GCUUCCUGCACAACCAGGCCAAGAACCUGCUGUGCGGCUUCUACG |
| | | GCCGGCACGCCGAGCUGCGGUUCCUGGACCUGGUGCCCUCCCUGC |
| | | AGCUGGACCCCGCCCAGAUCUACCGGGUGACCUGGUUCAUCUCCU |
| | | GGUCCCCCUGCUUCUCCUGGGGCUGCGCCGGCGAGGUGCGGGCCU |
| | | UCCUGCAGGAGAACACCCACGUGCGGCUGCGGAUCUUCGCCGCCC |
| | | GGAUCUACGACUACGACCCCCUGUACAAGGAGGCCCUGCAGAUGC |
| | | UGCGGGACGCCGGCGCCCAGGUGUCCAUCAUGACCUACGACGAGU |
| | | UCAAGCACUGCUGGGACACCUUCGUGGACCACCAGGGCUGCCCCU |
| | | UCCAGCCCUGGGACGGCCUGGACGAGCACUCCCAGGCCCUGUCCG |
| | | GCCGGCUGCGGGCCAUCCUGCAGAACCAGGGCAACUCCGGCUCCG |
| | | AGACCCCCGGCACCUCCGAGUCCGCCACCCCCGAGUCCGCAGCGU |
| | | UCAAACCAAAUCCCAUCAACUACAUCCUGGGCCUGGCCAUCGGCA |
| | | UCGCCUCCGUGGGCUGGGCCAUGGUGGAGAUCGACGAGGAGGAG |
| | | AACCCCAUCCGGCUGAUCGACCUGGGCGUGCGGGUGUUCGAGCGG |
| | | GCCGAGGUGCCCAAGACCGGCGACUCCCUGGCCAUGGCCCGGCGG |
| | | CUGGCCCGGUCCGUGCGGCGGCUGACCCGGCGGCGGGCCCACCGG |
| | | CUGCUGCGGGCCCGGCGGCUGCUGAAGCGGGAGGGCGUGCUGCAG |
| | | GCCGCCGACUUCGACGAGAACGGCCUGAUCAAGUCCCUGCCCAAC |
| | | ACCCCCUGGCAGCUGCGGGCCGCCGCCCUGGACCGGAAGCUGACC |
| | | CCCCUGGAGUGGUCCGCCGUGCUGCUGCACCUGAUCAAGCACCGG |
| | | GGCUACCUGUCCCAGCGGAAGAACGAGGGCGAGACCGCCGACAAG |
| | | GAGCUGGGCGCCCUGCUGAAGGGCGUGGCCAACAACGCCCACGCC |
| | | CUGCAGACCGGCGACUUCCGGACCCCCGCCGAGCUGGCCCUGAAC |
| | | AAGUUCGAGAAGGAGUCCGGCCACAUCCGGAACCAGCGGGGCGAC |
| | | UACUCCCACACCUUCUCCCGGAAGGACCUGCAGGCCGAGCUGAUC |
| | | CUGCUGUUCGAGAAGCAGAAGGAGUUCGGCAACCCCCACGUGUCC |
| | | GGCGGCCUGAAGGAGGGCAUCGAGACCCUGCUGAUGACCCAGCGG |
| | | CCCGCCCUGUCCGGCGACGCCGUGCAGAAGAUGCUGGGCCACUGC |
| | | ACCUUCGAGCCCGCCGAGCCCAAGGCCGCCAAGAACACCUACACC |
| | | GCCGAGCGGUUCAUCUGGCUGACCAAGCUGAACAACCUGCGGAUC |
| | | CUGGAGCAGGGCUCCGAGCGGCCCCUGACCGACACCGAGCGGGCC |
| | | ACCCUGAUGGACGAGCCCUACCGGAAGUCCAAGCUGACCUACGCC |
| | | CAGGCCCGGAAGCUGCUGGGCCUGGAGGACACCGCCUUCUUCAAG |
| | | GGCCUGCGGUACGGCAAGGACAACGCCGAGGCCUCCACCCUGAUG |
| | | GAGAUGAAGGCCUACCACGCCAUCUCCCGGGCCCUGGAGAAGGAG |
| | | GGCCUGAAGGACAAGAAGUCCCCCCUGAACCUGUCCUCCGAGCUG |
| | | CAGGACGAGAUCGGCACCGCCUUCUCCCUGUUCAAGACCGACGAG |
| | | GACAUCACCGGCCGGCUGAAGGACCGGGUGCAGCCCGAGAUCCUG |
| | | GAGGCCCUGCUGAAGCACAUCUCCUUCGACAAGUUCGUGCAGAUC |
| | | UCCCUGAAGGCCCUGCGGCGGAUCGUGCCCCUGAUGGAGCAGGGC |
| | | AAGCGGUACGACGAGGCCUGCGCCGAGAUCUACGGCGACCACUAC |
| | | GGCAAGAAGAACACCGAGGAGAAGAUCUACCUGCCCCCCAUCCCC |
| | | GCCGACGAGAUCCGGAACCCCGUGGUGCUGCGGGCCCUGUCCCAG |
| | | GCCCGGAAGGUGAUCAACGGCGUGGUGCGGCGGUACGGCUCCCCC |
| | | GCCCGGAUCCACAUCGAGACCGCCCGGGAGGUGGGCAAGUCCUUC |
| | | AAGGACCGGAAGGAGAUCGAGAAGCGGCAGGAGGAGAACCGGAA |
| | | GGACCGGGAGAAGGCCGCCGCCAAGUUCCGGGAGUACUUCCCCAA |
| | | CUUCGUGGGCGAGCCCAAGUCCAAGGACAUCCUGAAGCUGCGGCU |
| | | GUACGAGCAGCAGCACGGCAAGUGCCUGUACUCCGGCAAGGAGA |
| | | UCAACCUGGUGCGGCUGAACGAGAAGGGCUACGUGGAGAUCGAC |
| | | CACGCCCUGCCCUUCUCCCGGACCUGGGACGACUCCUUCAACAAC |
| | | AAGGUGCUGGUGCUGGGCUCCGAGAACCAGAACAAGGGCAACCA |
| | | GACCCCCUACGAGUACUUCAACGGCAAGGACAACUCCCGGGAGUG |
| | | GCAGGAGUUCAAGGCCCGGGUGGAGACCUCCCGGUUCCCCCGGUC |
| | | CAAGAAGCAGCGGAUCCUGCUGCAGAAGUUCGACGAGGACGGCU |
| | | UCAAGGAGUGCAACCUGAACGACACCCGGUACGUGAACCGCUUCC |
| | | UGUGCCAGUUCGUGGCCGACCACAUCCUGCUGACCGGCAAGGGCA |
| | | AGCGGCGGGUGUUCGCCUCCAACGGCCAGAUCACCAACCUGCUGC |
| | | GGGGCUUCUGGGGCCUGCGGAAGGUGCGGGCCGAGAACGACCGG |
| | | CACCACGCCCUGGACGCCGUGGUGGUGGCCUGCUCCACCGUGGCC |
| | | AUGCAGCAGAAGAUCACCCGGUUCGUGCGGUACAAGGAGAUGAA |
| | | CGCCUUCGACGGCAAGACCAUCGACAAGGAGACCGGCAAGGUGCU |
| | | GCACCAGAAGACCCACUUCCCCCAGCCCUGGGAGUUCUUCGCCCA |
| | | GGAGGUGAUGAUCCGGGUGUUCGGCAAGCCCGACGGCAAGCCCG |
| | | AGUUCGAGGAGGCCGACACCCCCGAGAAGCUGCGGACCCUGCUGG |
| | | CCGAGAAGCUGUCCUCCCGGCCCGAGGCCGUGCACGAGUACGUGA |
| | | CCCCCCUGUUCGUGUCCCGGGCCCCCAACCGGAAGAUGUCCGGCG |
| | | CCCACAAGGACACCCUGCGGUCCGCCAAGCGGUUCGUGAAGCACA |
| | | ACGAGAAGAUCUCCGUGAAGCGGGUGUGGCUGACCGAGAUCAAG |
| | | CUGGCCGACCUGGAGAACAUGGUGAACUACAAGAACGGCCGGGA |
| | | GAUCGAGCUGUACGAGGCCCUGAAGGCCCGGCUGGAGGCCUACGG |
| | | CGGCAACGCCAAGCAGGCCUUCGACCCCAAGGACAACCCCUUCUA |
| | | CAAGAAGGGCGGCCAGCUGGUGAAGGCCGUGCGGGUGGAGAAGA |
| | | CCCAGGAGUCCGGCGUGCUGCUGAACAAGAAGAACGCCUACACCA |
| | | UCGCCGACAACGGCGACAUGGUGCGGGUGGACGUGUUCUGCAAG |
| | | GUGGACAAGAAGGGCAAGAACCAGUACUUCAUCGUGCCCAUCUA |
| | | CGCCUGGCAGGUGGCCGAGAACAUCCUGCCCGACAUCGACUGCAA |
| | | GGGCUACCGGAUCGACGACUCCUACACCUUCUGCUUCUCCCUGCA |
| | | CAAGUACGACCUGAUCGCCUUCCAGAAGGACGAGAAGUCCAAGG |
| | | UGGAGUUCGCCUACUACAUCAACUGCGACUCCUCCAACGGCCGGU |
| | | UCUACCUGGCCUGGCACGACAAGGGCUCCAAGGAGCAGCAGUUCC |
| | | GGAUCUCCACCCAGAACCUGGUGCUGAUCCAGAAGUACCAGGUGA |
| | | ACGAGCUGGGCAAGGAGAUCCGGCCCUGCCGGCUGAAGAAGCGGC |
| | | CCCCCGUGCGGGAGGACAAGCGGCCCGCCGCCACCAAGAAGGCCG |
| | | GCCAGGCCAAGAAGAAGAAGUACCCCUACGACGUGCCCGACUACG |
| | | CCGGCUACCCCUACGACGUGCCCGACUACGCCGGCUCCUACCCCU |
| | | ACGACGUGCCCGACUACGCCGCCGCCCCCGCCGCCAAGAAGAAGA |
| | | AGCUGGACUAGCUAGUGACUAGCACCAGCCUCAAGAACACCCGAA |
| | | UGGAGUCUCUAAGCUACAUAAUACCAACUUACACUUUACAAAAU |
| | | GUUGUCCCCCAAAAUGUAGCCAUUCGUAUCUGCUCCUAAUAAAA |
| | | AGAAAGUUUCUUCACAUUCU |
| 141 | Exemplary open | AUGGACGGCUCCGGCGGCGGCUCCCCCAAGAAGAAGCGGAAGGUG |
| | reading frame for | GAGGACAAGCGGCCCGCCGCCACCAAGAAGGCCGGCCAGGCCAAG |
| | APOBEC3A- | AAGAAGAAGGGCGGCUCCGGCGGCGGCGAGGCCUCCCCCGCCUCC |
| | Nme2D16A | GGCCCCCGGCACCUGAUGGACCCCCACAUCUUCACCUCCAACUUC |
| | | AACAACGGCAUCGGCCGGCACAAGACCUACCUGUGCUACGAGGUG |
| | | GAGCGGCUGGACAACGGCACCUCCGUGAAGAUGGACCAGCACCGG |
| | | GGCUUCCUGCACAACCAGGCCAAGAACCUGCUGUGCGGCUUCUAC |
| | | GGCCGGCACGCCGAGCUGCGGUUCCUGGACCUGGUGCCCUCCCUG |
| | | CAGCUGGACCCCGCCCAGAUCUACCGGGUGACCUGGUUCAUCUCC |
| | | UGGUCCCCCUGCUUCUCCUGGGGCUGCGCCGGCGAGGUGCGGGCC |
| | | UUCCUGCAGGAGAACACCCACGUGCGGCUGCGGAUCUUCGCCGCC |
| | | CGGAUCUACGACUACGACCCCCUGUACAAGGAGGCCCUGCAGAUG |
| | | CUGCGGGACGCCGGCGCCCAGGUGUCCAUCAUGACCUACGACGAG |
| | | UUCAAGCACUGCUGGGACACCUUCGUGGACCACCAGGGCUGCCCC |
| | | UUCCAGCCCUGGGACGGCCUGGACGAGCACUCCCAGGCCCUGUCC |
| | | GGCCGGCUGCGGGCCAUCCUGCAGAACCAGGGCAACUCCGGCUCC |
| | | GAGACCCCCGGCACCUCCGAGUCCGCCACCCCCGAGUCCGCAGCG |
| | | UUCAAACCAAAUCCCAUCAACUACAUCCUGGGCCUGGCCAUCGGC |
| | | AUCGCCUCCGUGGGCUGGGCCAUGGUGGAGAUCGACGAGGAGGA |
| | | GAACCCCAUCCGGCUGAUCGACCUGGGCGUGCGGGUGUUCGAGCG |
| | | GGCCGAGGUGCCCAAGACCGGCGACUCCCUGGCCAUGGCCCGGCG |
| | | GCUGGCCCGGUCCGUGCGGCGGCUGACCCGGCGGCGGGCCCACCG |
| | | GCUGCUGCGGGCCCGGCGGCUGCUGAAGCGGGAGGGCGUGCUGCA |
| | | GGCCGCCGACUUCGACGAGAACGGCCUGAUCAAGUCCCUGCCCAA |
| | | CACCCCCUGGCAGCUGCGGGCCGCCGCCCUGGACCGGAAGCUGAC |
| | | CCCCCUGGAGUGGUCCGCCGUGCUGCUGCACCUGAUCAAGCACCG |
| | | GGGCUACCUGUCCCAGCGGAAGAACGAGGGCGAGACCGCCGACAA |
| | | GGAGCUGGGCGCCCUGCUGAAGGGCGUGGCCAACAACGCCCACGC |
| | | CCUGCAGACCGGCGACUUCCGGACCCCCGCCGAGCUGGCCCUGAA |
| | | CAAGUUCGAGAAGGAGUCCGGCCACAUCCGGAACCAGCGGGGCGA |
| | | CUACUCCCACACCUUCUCCCGGAAGGACCUGCAGGCCGAGCUGAU |
| | | CCUGCUGUUCGAGAAGCAGAAGGAGUUCGGCAACCCCCACGUGUC |
| | | CGGCGGCCUGAAGGAGGGCAUCGAGACCCUGCUGAUGACCCAGCG |
| | | GCCCGCCCUGUCCGGCGACGCCGUGCAGAAGAUGCUGGGCCACUG |
| | | CACCUUCGAGCCCGCCGAGCCCAAGGCCGCCAAGAACACCUACAC |
| | | CGCCGAGCGGUUCAUCUGGCUGACCAAGCUGAACAACCUGCGGAU |
| | | CCUGGAGCAGGGCUCCGAGCGGCCCCUGACCGACACCGAGCGGGC |
| | | CACCCUGAUGGACGAGCCCUACCGGAAGUCCAAGCUGACCUACGC |
| | | CCAGGCCCGGAAGCUGCUGGGCCUGGAGGACACCGCCUUCUUCAA |
| | | GGGCCUGCGGUACGGCAAGGACAACGCCGAGGCCUCCACCCUGAU |
| | | GGAGAUGAAGGCCUACCACGCCAUCUCCCGGGCCCUGGAGAAGGA |
| | | GGGCCUGAAGGACAAGAAGUCCCCCCUGAACCUGUCCUCCGAGCU |
| | | GCAGGACGAGAUCGGCACCGCCUUCUCCCUGUUCAAGACCGACGA |
| | | GGACAUCACCGGCCGGCUGAAGGACCGGGUGCAGCCCGAGAUCCU |
| | | GGAGGCCCUGCUGAAGCACAUCUCCUUCGACAAGUUCGUGCAGAU |
| | | CUCCCUGAAGGCCCUGCGGCGGAUCGUGCCCCUGAUGGAGCAGGG |
| | | CAAGCGGUACGACGAGGCCUGCGCCGAGAUCUACGGCGACCACUA |
| | | CGGCAAGAAGAACACCGAGGAGAAGAUCUACCUGCCCCCCAUCCC |
| | | CGCCGACGAGAUCCGGAACCCCGUGGUGCUGCGGGCCCUGUCCCA |
| | | GGCCCGGAAGGUGAUCAACGGCGUGGUGCGGCGGUACGGCUCCCC |
| | | CGCCCGGAUCCACAUCGAGACCGCCCGGGAGGUGGGCAAGUCCUU |
| | | CAAGGACCGGAAGGAGAUCGAGAAGCGGCAGGAGGAGAACCGGA |
| | | AGGACCGGGAGAAGGCCGCCGCCAAGUUCCGGGAGUACUUCCCCA |
| | | ACUUCGUGGGCGAGCCCAAGUCCAAGGACAUCCUGAAGCUGCGGC |
| | | UGUACGAGCAGCAGCACGGCAAGUGCCUGUACUCCGGCAAGGAG |
| | | AUCAACCUGGUGCGGCUGAACGAGAAGGGCUACGUGGAGAUCGA |
| | | CCACGCCCUGCCCUUCUCCCGGACCUGGGACGACUCCUUCAACAA |
| | | CAAGGUGCUGGUGCUGGGCUCCGAGAACCAGAACAAGGGCAACC |
| | | AGACCCCCUACGAGUACUUCAACGGCAAGGACAACUCCCGGGAGU |
| | | GGCAGGAGUUCAAGGCCCGGGUGGAGACCUCCCGGUUCCCCCGGU |
| | | CCAAGAAGCAGCGGAUCCUGCUGCAGAAGUUCGACGAGGACGGC |
| | | UUCAAGGAGUGCAACCUGAACGACACCCGGUACGUGAACCGCUUC |
| | | CUGUGCCAGUUCGUGGCCGACCACAUCCUGCUGACCGGCAAGGGC |
| | | AAGCGGCGGGUGUUCGCCUCCAACGGCCAGAUCACCAACCUGCUG |
| | | CGGGGCUUCUGGGGCCUGCGGAAGGUGCGGGCCGAGAACGACCG |
| | | GCACCACGCCCUGGACGCCGUGGUGGUGGCCUGCUCCACCGUGGC |
| | | CAUGCAGCAGAAGAUCACCCGGUUCGUGCGGUACAAGGAGAUGA |
| | | ACGCCUUCGACGGCAAGACCAUCGACAAGGAGACCGGCAAGGUGC |
| | | UGCACCAGAAGACCCACUUCCCCCAGCCCUGGGAGUUCUUCGCCC |
| | | AGGAGGUGAUGAUCCGGGUGUUCGGCAAGCCCGACGGCAAGCCC |
| | | GAGUUCGAGGAGGCCGACACCCCCGAGAAGCUGCGGACCCUGCUG |
| | | GCCGAGAAGCUGUCCUCCCGGCCCGAGGCCGUGCACGAGUACGUG |
| | | ACCCCCCUGUUCGUGUCCCGGGCCCCCAACCGGAAGAUGUCCGGC |
| | | GCCCACAAGGACACCCUGCGGUCCGCCAAGCGGUUCGUGAAGCAC |
| | | AACGAGAAGAUCUCCGUGAAGCGGGUGUGGCUGACCGAGAUCAA |
| | | GCUGGCCGACCUGGAGAACAUGGUGAACUACAAGAACGGCCGGG |
| | | AGAUCGAGCUGUACGAGGCCCUGAAGGCCCGGCUGGAGGCCUACG |
| | | GCGGCAACGCCAAGCAGGCCUUCGACCCCAAGGACAACCCCUUCU |
| | | ACAAGAAGGGCGGCCAGCUGGUGAAGGCCGUGCGGGUGGAGAAG |
| | | ACCCAGGAGUCCGGCGUGCUGCUGAACAAGAAGAACGCCUACACC |
| | | AUCGCCGACAACGGCGACAUGGUGCGGGUGGACGUGUUCUGCAA |
| | | GGUGGACAAGAAGGGCAAGAACCAGUACUUCAUCGUGCCCAUCU |
| | | ACGCCUGGCAGGUGGCCGAGAACAUCCUGCCCGACAUCGACUGCA |
| | | AGGGCUACCGGAUCGACGACUCCUACACCUUCUGCUUCUCCCUGC |
| | | ACAAGUACGACCUGAUCGCCUUCCAGAAGGACGAGAAGUCCAAG |
| | | GUGGAGUUCGCCUACUACAUCAACUGCGACUCCUCCAACGGCCGG |
| | | UUCUACCUGGCCUGGCACGACAAGGGCUCCAAGGAGCAGCAGUUC |
| | | CGGAUCUCCACCCAGAACCUGGUGCUGAUCCAGAAGUACCAGGUG |
| | | AACGAGCUGGGCAAGGAGAUCCGGCCCUGCCGGCUGAAGAAGCG |
| | | GCCCCCCGUGCGGGAGGACAAGCGGCCCGCCGCCACCAAGAAGGC |
| | | CGGCCAGGCCAAGAAGAAGAAGUACCCCUACGACGUGCCCGACUA |
| | | CGCCGGCUACCCCUACGACGUGCCCGACUACGCCGGCUCCUACCC |
| | | CUACGACGUGCCCGACUACGCCGCCGCCCCCGCCGCCAAGAAGAA |
| | | GAAGCUGGACU |
| 142 | Exemplary amino | MDGSGGGSPKKKRKVEDKRPAATKKAGQAKKKKGGSGGGEASPASG |
| | acid sequence for | PRHLMDPHIFTSNFNNGIGRHKTYLCYEVERLDNGTSVKMDQHRGFLH |
| | APOBEC3A- | NQAKNLLCGFYGRHAELRFLDLVPSLQLDPAQIYRVTWFISWSPCFSW |
| | Nme2D16A | GCAGEVRAFLQENTHVRLRIFAARIYDYDPLYKEALQMLRDAGAQVSI |
| | | MTYDEFKHCWDTFVDHQGCPFQPWDGLDEHSQALSGRLRAILQNQG |
| | | NSGSETPGTSESATPESAAFKPNPINYILGLAIGIASVGWAMVEIDEEEN |
| | | PIRLIDLGVRVFERAEVPKTGDSLAMARRLARSVRRLTRRRAHRLLRA |
| | | RRLLKREGVLQAADFDENGLIKSLPNTPWQLRAAALDRKLTPLEWSA |
| | | VLLHLIKHRGYLSQRKNEGETADKELGALLKGVANNAHALQTGDFRT |
| | | PAELALNKFEKESGHIRNQRGDYSHTFSRKDLQAELILLFEKQKEFGNP |
| | | HVSGGLKEGIETLLMTQRPALSGDAVQKMLGHCTFEPAEPKAAKNTY |
| | | TAERFIWLTKLNNLRILEQGSERPLTDTERATLMDEPYRKSKLTYAQA |
| | | RKLLGLEDTAFFKGLRYGKDNAEASTLMEMKAYHAISRALEKEGLKD |
| | | KKSPLNLSSELQDEIGTAFSLFKTDEDITGRLKDRVQPEILEALLKHISFD |
| | | KFVQISLKALRRIVPLMEQGKRYDEACAEIYGDHYGKKNTEEKIYLPPI |
| | | PADEIRNPVVLRALSQARKVINGVVRRYGSPARIHIETAREVGKSFKDR |
| | | KEIEKRQEENRKDREKAAAKFREYFPNFVGEPKSKDILKLRLYEQQHG |
| | | KCLYSGKEINLVRLNEKGYVEIDHALPFSRTWDDSFNNKVLVLGSENQ |
| | | NKGNQTPYEYFNGKDNSREWQEFKARVETSRFPRSKKQRILLQKFDED |
| | | GFKECNLNDTRYVNRFLCQFVADHILLTGKGKRRVFASNGQITNLLRG |
| | | FWGLRKVRAENDRHHALDAVVVACSTVAMQQKITRFVRYKEMNAFD |
| | | GKTIDKETGKVLHQKTHFPQPWEFFAQEVMIRVFGKPDGKPEFEEADT |
| | | PEKLRTLLAEKLSSRPEAVHEYVTPLFVSRAPNRKMSGAHKDTLRSAK |
| | | RFVKHNEKISVKRVWLTEIKLADLENMVNYKNGREIELYEALKARLEA |
| | | YGGNAKQAFDPKDNPFYKKGGQLVKAVRVEKTQESGVLLNKKNAYT |
| | | IADNGDMVRVDVFCKVDKKGKNQYFIVPIYAWQVAENILPDIDCKGY |
| | | RIDDSYTFCFSLHKYDLIAFQKDEKSKVEFAYYINCDSSNGRFYLAWH |
| | | DKGSKEQQFRISTQNLVLIQKYQVNELGKEIRPCRLKKRPPVREDKRPA |
| | | ATKKAGQAKKKKYPYDVPDYAGYPYDVPDYAGSYPYDVPDYAAAPA |
| | | AKKKKLD |
| 143 | EXEMPLARY | GGGAAGCUCAGAAUAAACGCUCAACUUUGGCCGGAUCUGCCACCA |
| | MRNA | UGGACGGCUCCGGCGGCGGCUCCCCCAAGAAGAAGCGGAAGGUGG |
| | ENCODING | AGGACAAGCGGCCCGCCGCCACCAAGAAGGCCGGCCAGGCCAAGA |
| | APOBEC3A- | AGAAGAAGGGCGGCUCCGGCGGCGGCGAGGCCUCCCCCGCCUCCG |
| | NME2D16A | GCCCCCGGCACCUGAUGGACCCCCACAUCUUCACCUCCAACUUCA |
| | | ACAACGGCAUCGGCCGGCACAAGACCUACCUGUGCUACGAGGUGG |
| | | AGCGGCUGGACAACGGCACCUCCGUGAAGAUGGACCAGCACCGGG |
| | | GCUUCCUGCACAACCAGGCCAAGAACCUGCUGUGCGGCUUCUACG |
| | | GCCGGCACGCCGAGCUGCGGUUCCUGGACCUGGUGCCCUCCCUGC |
| | | AGCUGGACCCCGCCCAGAUCUACCGGGUGACCUGGUUCAUCUCCU |
| | | GGUCCCCCUGCUUCUCCUGGGGCUGCGCCGGCGAGGUGCGGGCCU |
| | | UCCUGCAGGAGAACACCCACGUGCGGCUGCGGAUCUUCGCCGCCC |
| | | GGAUCUACGACUACGACCCCCUGUACAAGGAGGCCCUGCAGAUGC |
| | | UGCGGGACGCCGGCGCCCAGGUGUCCAUCAUGACCUACGACGAGU |
| | | UCAAGCACUGCUGGGACACCUUCGUGGACCACCAGGGCUGCCCCU |
| | | UCCAGCCCUGGGACGGCCUGGACGAGCACUCCCAGGCCCUGUCCG |
| | | GCCGGCUGCGGGCCAUCCUGCAGAACCAGGGCAACUCCGGCUCCG |
| | | AGACCCCCGGCACCUCCGAGUCCGCCACCCCCGAGUCCGCAGCGU |
| | | UCAAACCAAAUCCCAUCAACUACAUCCUGGGCCUGGCCAUCGGCA |
| | | UCGCCUCCGUGGGCUGGGCCAUGGUGGAGAUCGACGAGGAGGAG |
| | | AACCCCAUCCGGCUGAUCGACCUGGGCGUGCGGGUGUUCGAGCGG |
| | | GCCGAGGUGCCCAAGACCGGCGACUCCCUGGCCAUGGCCCGGCGG |
| | | CUGGCCCGGUCCGUGCGGCGGCUGACCCGGCGGCGGGCCCACCGG |
| | | CUGCUGCGGGCCCGGCGGCUGCUGAAGCGGGAGGGCGUGCUGCAG |
| | | GCCGCCGACUUCGACGAGAACGGCCUGAUCAAGUCCCUGCCCAAC |
| | | ACCCCCUGGCAGCUGCGGGCCGCCGCCCUGGACCGGAAGCUGACC |
| | | CCCCUGGAGUGGUCCGCCGUGCUGCUGCACCUGAUCAAGCACCGG |
| | | GGCUACCUGUCCCAGCGGAAGAACGAGGGCGAGACCGCCGACAAG |
| | | GAGCUGGGCGCCCUGCUGAAGGGCGUGGCCAACAACGCCCACGCC |
| | | CUGCAGACCGGCGACUUCCGGACCCCCGCCGAGCUGGCCCUGAAC |
| | | AAGUUCGAGAAGGAGUCCGGCCACAUCCGGAACCAGCGGGGCGAC |
| | | UACUCCCACACCUUCUCCCGGAAGGACCUGCAGGCCGAGCUGAUC |
| | | CUGCUGUUCGAGAAGCAGAAGGAGUUCGGCAACCCCCACGUGUCC |
| | | GGCGGCCUGAAGGAGGGCAUCGAGACCCUGCUGAUGACCCAGCGG |
| | | CCCGCCCUGUCCGGCGACGCCGUGCAGAAGAUGCUGGGCCACUGC |
| | | ACCUUCGAGCCCGCCGAGCCCAAGGCCGCCAAGAACACCUACACC |
| | | GCCGAGCGGUUCAUCUGGCUGACCAAGCUGAACAACCUGCGGAUC |
| | | CUGGAGCAGGGCUCCGAGCGGCCCCUGACCGACACCGAGCGGGCC |
| | | ACCCUGAUGGACGAGCCCUACCGGAAGUCCAAGCUGACCUACGCC |
| | | CAGGCCCGGAAGCUGCUGGGCCUGGAGGACACCGCCUUCUUCAAG |
| | | GGCCUGCGGUACGGCAAGGACAACGCCGAGGCCUCCACCCUGAUG |
| | | GAGAUGAAGGCCUACCACGCCAUCUCCCGGGCCCUGGAGAAGGAG |
| | | GGCCUGAAGGACAAGAAGUCCCCCCUGAACCUGUCCUCCGAGCUG |
| | | CAGGACGAGAUCGGCACCGCCUUCUCCCUGUUCAAGACCGACGAG |
| | | GACAUCACCGGCCGGCUGAAGGACCGGGUGCAGCCCGAGAUCCUG |
| | | GAGGCCCUGCUGAAGCACAUCUCCUUCGACAAGUUCGUGCAGAUC |
| | | UCCCUGAAGGCCCUGCGGCGGAUCGUGCCCCUGAUGGAGCAGGGC |
| | | AAGCGGUACGACGAGGCCUGCGCCGAGAUCUACGGCGACCACUAC |
| | | GGCAAGAAGAACACCGAGGAGAAGAUCUACCUGCCCCCCAUCCCC |
| | | GCCGACGAGAUCCGGAACCCCGUGGUGCUGCGGGCCCUGUCCCAG |
| | | GCCCGGAAGGUGAUCAACGGCGUGGUGCGGCGGUACGGCUCCCCC |
| | | GCCCGGAUCCACAUCGAGACCGCCCGGGAGGUGGGCAAGUCCUUC |
| | | AAGGACCGGAAGGAGAUCGAGAAGCGGCAGGAGGAGAACCGGAA |
| | | GGACCGGGAGAAGGCCGCCGCCAAGUUCCGGGAGUACUUCCCCAA |
| | | CUUCGUGGGCGAGCCCAAGUCCAAGGACAUCCUGAAGCUGCGGCU |
| | | GUACGAGCAGCAGCACGGCAAGUGCCUGUACUCCGGCAAGGAGA |
| | | UCAACCUGGUGCGGCUGAACGAGAAGGGCUACGUGGAGAUCGAC |
| | | CACGCCCUGCCCUUCUCCCGGACCUGGGACGACUCCUUCAACAAC |
| | | AAGGUGCUGGUGCUGGGCUCCGAGAACCAGAACAAGGGCAACCA |
| | | GACCCCCUACGAGUACUUCAACGGCAAGGACAACUCCCGGGAGUG |
| | | GCAGGAGUUCAAGGCCCGGGUGGAGACCUCCCGGUUCCCCCGGUC |
| | | CAAGAAGCAGCGGAUCCUGCUGCAGAAGUUCGACGAGGACGGCU |
| | | UCAAGGAGUGCAACCUGAACGACACCCGGUACGUGAACCGCUUCC |
| | | UGUGCCAGUUCGUGGCCGACCACAUCCUGCUGACCGGCAAGGGCA |
| | | AGCGGCGGGUGUUCGCCUCCAACGGCCAGAUCACCAACCUGCUGC |
| | | GGGGCUUCUGGGGCCUGCGGAAGGUGCGGGCCGAGAACGACCGG |
| | | CACCACGCCCUGGACGCCGUGGUGGUGGCCUGCUCCACCGUGGCC |
| | | AUGCAGCAGAAGAUCACCCGGUUCGUGCGGUACAAGGAGAUGAA |
| | | CGCCUUCGACGGCAAGACCAUCGACAAGGAGACCGGCAAGGUGCU |
| | | GCACCAGAAGACCCACUUCCCCCAGCCCUGGGAGUUCUUCGCCCA |
| | | GGAGGUGAUGAUCCGGGUGUUCGGCAAGCCCGACGGCAAGCCCG |
| | | AGUUCGAGGAGGCCGACACCCCCGAGAAGCUGCGGACCCUGCUGG |
| | | CCGAGAAGCUGUCCUCCCGGCCCGAGGCCGUGCACGAGUACGUGA |
| | | CCCCCCUGUUCGUGUCCCGGGCCCCCAACCGGAAGAUGUCCGGCG |
| | | CCCACAAGGACACCCUGCGGUCCGCCAAGCGGUUCGUGAAGCACA |
| | | ACGAGAAGAUCUCCGUGAAGCGGGUGUGGCUGACCGAGAUCAAG |
| | | CUGGCCGACCUGGAGAACAUGGUGAACUACAAGAACGGCCGGGA |
| | | GAUCGAGCUGUACGAGGCCCUGAAGGCCCGGCUGGAGGCCUACGG |
| | | CGGCAACGCCAAGCAGGCCUUCGACCCCAAGGACAACCCCUUCUA |
| | | CAAGAAGGGCGGCCAGCUGGUGAAGGCCGUGCGGGUGGAGAAGA |
| | | CCCAGGAGUCCGGCGUGCUGCUGAACAAGAAGAACGCCUACACCA |
| | | UCGCCGACAACGGCGACAUGGUGCGGGUGGACGUGUUCUGCAAG |
| | | GUGGACAAGAAGGGCAAGAACCAGUACUUCAUCGUGCCCAUCUA |
| | | CGCCUGGCAGGUGGCCGAGAACAUCCUGCCCGACAUCGACUGCAA |
| | | GGGCUACCGGAUCGACGACUCCUACACCUUCUGCUUCUCCCUGCA |
| | | CAAGUACGACCUGAUCGCCUUCCAGAAGGACGAGAAGUCCAAGG |
| | | UGGAGUUCGCCUACUACAUCAACUGCGACUCCUCCAACGGCCGGU |
| | | UCUACCUGGCCUGGCACGACAAGGGCUCCAAGGAGCAGCAGUUCC |
| | | GGAUCUCCACCCAGAACCUGGUGCUGAUCCAGAAGUACCAGGUGA |
| | | ACGAGCUGGGCAAGGAGAUCCGGCCCUGCCGGCUGAAGAAGCGGC |
| | | CCCCCGUGCGGUAGUGACUAGCACCAGCCUCAAGAACACCCGAAU |
| | | GGAGUCUCUAAGCUACAUAAUACCAACUUACACUUUACAAAAUG |
| | | UUGUCCCCCAAAAUGUAGCCAUUCGUAUCUGCUCCUAAUAAAAA |
| | | GAAAGUUUCUUCACAUUCU |
| 144 | Exemplary open | AUGGACGGCUCCGGCGGCGGCUCCCCCAAGAAGAAGCGGAAGGUG |
| | reading frame for | GAGGACAAGCGGCCCGCCGCCACCAAGAAGGCCGGCCAGGCCAAG |
| | APOBEC3A- | AAGAAGAAGGGCGGCUCCGGCGGCGGCGAGGCCUCCCCCGCCUCC |
| | Nme2D16A | GGCCCCCGGCACCUGAUGGACCCCCACAUCUUCACCUCCAACUUC |
| | | AACAACGGCAUCGGCCGGCACAAGACCUACCUGUGCUACGAGGUG |
| | | GAGCGGCUGGACAACGGCACCUCCGUGAAGAUGGACCAGCACCGG |
| | | GGCUUCCUGCACAACCAGGCCAAGAACCUGCUGUGCGGCUUCUAC |
| | | GGCCGGCACGCCGAGCUGCGGUUCCUGGACCUGGUGCCCUCCCUG |
| | | CAGCUGGACCCCGCCCAGAUCUACCGGGUGACCUGGUUCAUCUCC |
| | | UGGUCCCCCUGCUUCUCCUGGGGCUGCGCCGGCGAGGUGCGGGCC |
| | | UUCCUGCAGGAGAACACCCACGUGCGGCUGCGGAUCUUCGCCGCC |
| | | CGGAUCUACGACUACGACCCCCUGUACAAGGAGGCCCUGCAGAUG |
| | | CUGCGGGACGCCGGCGCCCAGGUGUCCAUCAUGACCUACGACGAG |
| | | UUCAAGCACUGCUGGGACACCUUCGUGGACCACCAGGGCUGCCCC |
| | | UUCCAGCCCUGGGACGGCCUGGACGAGCACUCCCAGGCCCUGUCC |
| | | GGCCGGCUGCGGGCCAUCCUGCAGAACCAGGGCAACUCCGGCUCC |
| | | GAGACCCCCGGCACCUCCGAGUCCGCCACCCCCGAGUCCGCAGCG |
| | | UUCAAACCAAAUCCCAUCAACUACAUCCUGGGCCUGGCCAUCGGC |
| | | AUCGCCUCCGUGGGCUGGGCCAUGGUGGAGAUCGACGAGGAGGA |
| | | GAACCCCAUCCGGCUGAUCGACCUGGGCGUGCGGGUGUUCGAGCG |
| | | GGCCGAGGUGCCCAAGACCGGCGACUCCCUGGCCAUGGCCCGGCG |
| | | GCUGGCCCGGUCCGUGCGGCGGCUGACCCGGCGGCGGGCCCACCG |
| | | GCUGCUGCGGGCCCGGCGGCUGCUGAAGCGGGAGGGCGUGCUGCA |
| | | GGCCGCCGACUUCGACGAGAACGGCCUGAUCAAGUCCCUGCCCAA |
| | | CACCCCCUGGCAGCUGCGGGCCGCCGCCCUGGACCGGAAGCUGAC |
| | | CCCCCUGGAGUGGUCCGCCGUGCUGCUGCACCUGAUCAAGCACCG |
| | | GGGCUACCUGUCCCAGCGGAAGAACGAGGGCGAGACCGCCGACAA |
| | | GGAGCUGGGCGCCCUGCUGAAGGGCGUGGCCAACAACGCCCACGC |
| | | CCUGCAGACCGGCGACUUCCGGACCCCCGCCGAGCUGGCCCUGAA |
| | | CAAGUUCGAGAAGGAGUCCGGCCACAUCCGGAACCAGCGGGGCGA |
| | | CUACUCCCACACCUUCUCCCGGAAGGACCUGCAGGCCGAGCUGAU |
| | | CCUGCUGUUCGAGAAGCAGAAGGAGUUCGGCAACCCCCACGUGUC |
| | | CGGCGGCCUGAAGGAGGGCAUCGAGACCCUGCUGAUGACCCAGCG |
| | | GCCCGCCCUGUCCGGCGACGCCGUGCAGAAGAUGCUGGGCCACUG |
| | | CACCUUCGAGCCCGCCGAGCCCAAGGCCGCCAAGAACACCUACAC |
| | | CGCCGAGCGGUUCAUCUGGCUGACCAAGCUGAACAACCUGCGGAU |
| | | CCUGGAGCAGGGCUCCGAGCGGCCCCUGACCGACACCGAGCGGGC |
| | | CACCCUGAUGGACGAGCCCUACCGGAAGUCCAAGCUGACCUACGC |
| | | CCAGGCCCGGAAGCUGCUGGGCCUGGAGGACACCGCCUUCUUCAA |
| | | GGGCCUGCGGUACGGCAAGGACAACGCCGAGGCCUCCACCCUGAU |
| | | GGAGAUGAAGGCCUACCACGCCAUCUCCCGGGCCCUGGAGAAGGA |
| | | GGGCCUGAAGGACAAGAAGUCCCCCCUGAACCUGUCCUCCGAGCU |
| | | GCAGGACGAGAUCGGCACCGCCUUCUCCCUGUUCAAGACCGACGA |
| | | GGACAUCACCGGCCGGCUGAAGGACCGGGUGCAGCCCGAGAUCCU |
| | | GGAGGCCCUGCUGAAGCACAUCUCCUUCGACAAGUUCGUGCAGAU |
| | | CUCCCUGAAGGCCCUGCGGCGGAUCGUGCCCCUGAUGGAGCAGGG |
| | | CAAGCGGUACGACGAGGCCUGCGCCGAGAUCUACGGCGACCACUA |
| | | CGGCAAGAAGAACACCGAGGAGAAGAUCUACCUGCCCCCCAUCCC |
| | | CGCCGACGAGAUCCGGAACCCCGUGGUGCUGCGGGCCCUGUCCCA |
| | | GGCCCGGAAGGUGAUCAACGGCGUGGUGCGGCGGUACGGCUCCCC |
| | | CGCCCGGAUCCACAUCGAGACCGCCCGGGAGGUGGGCAAGUCCUU |
| | | CAAGGACCGGAAGGAGAUCGAGAAGCGGCAGGAGGAGAACCGGA |
| | | AGGACCGGGAGAAGGCCGCCGCCAAGUUCCGGGAGUACUUCCCCA |
| | | ACUUCGUGGGCGAGCCCAAGUCCAAGGACAUCCUGAAGCUGCGGC |
| | | UGUACGAGCAGCAGCACGGCAAGUGCCUGUACUCCGGCAAGGAG |
| | | AUCAACCUGGUGCGGCUGAACGAGAAGGGCUACGUGGAGAUCGA |
| | | CCACGCCCUGCCCUUCUCCCGGACCUGGGACGACUCCUUCAACAA |
| | | CAAGGUGCUGGUGCUGGGCUCCGAGAACCAGAACAAGGGCAACC |
| | | AGACCCCCUACGAGUACUUCAACGGCAAGGACAACUCCCGGGAGU |
| | | GGCAGGAGUUCAAGGCCCGGGUGGAGACCUCCCGGUUCCCCCGGU |
| | | CCAAGAAGCAGCGGAUCCUGCUGCAGAAGUUCGACGAGGACGGC |
| | | UUCAAGGAGUGCAACCUGAACGACACCCGGUACGUGAACCGCUUC |
| | | CUGUGCCAGUUCGUGGCCGACCACAUCCUGCUGACCGGCAAGGGC |
| | | AAGCGGCGGGUGUUCGCCUCCAACGGCCAGAUCACCAACCUGCUG |
| | | CGGGGCUUCUGGGGCCUGCGGAAGGUGCGGGCCGAGAACGACCG |
| | | GCACCACGCCCUGGACGCCGUGGUGGUGGCCUGCUCCACCGUGGC |
| | | CAUGCAGCAGAAGAUCACCCGGUUCGUGCGGUACAAGGAGAUGA |
| | | ACGCCUUCGACGGCAAGACCAUCGACAAGGAGACCGGCAAGGUGC |
| | | UGCACCAGAAGACCCACUUCCCCCAGCCCUGGGAGUUCUUCGCCC |
| | | AGGAGGUGAUGAUCCGGGUGUUCGGCAAGCCCGACGGCAAGCCC |
| | | GAGUUCGAGGAGGCCGACACCCCCGAGAAGCUGCGGACCCUGCUG |
| | | GCCGAGAAGCUGUCCUCCCGGCCCGAGGCCGUGCACGAGUACGUG |
| | | ACCCCCCUGUUCGUGUCCCGGGCCCCCAACCGGAAGAUGUCCGGC |
| | | GCCCACAAGGACACCCUGCGGUCCGCCAAGCGGUUCGUGAAGCAC |
| | | AACGAGAAGAUCUCCGUGAAGCGGGUGUGGCUGACCGAGAUCAA |
| | | GCUGGCCGACCUGGAGAACAUGGUGAACUACAAGAACGGCCGGG |
| | | AGAUCGAGCUGUACGAGGCCCUGAAGGCCCGGCUGGAGGCCUACG |
| | | GCGGCAACGCCAAGCAGGCCUUCGACCCCAAGGACAACCCCUUCU |
| | | ACAAGAAGGGCGGCCAGCUGGUGAAGGCCGUGCGGGUGGAGAAG |
| | | ACCCAGGAGUCCGGCGUGCUGCUGAACAAGAAGAACGCCUACACC |
| | | AUCGCCGACAACGGCGACAUGGUGCGGGUGGACGUGUUCUGCAA |
| | | GGUGGACAAGAAGGGCAAGAACCAGUACUUCAUCGUGCCCAUCU |
| | | ACGCCUGGCAGGUGGCCGAGAACAUCCUGCCCGACAUCGACUGCA |
| | | AGGGCUACCGGAUCGACGACUCCUACACCUUCUGCUUCUCCCUGC |
| | | ACAAGUACGACCUGAUCGCCUUCCAGAAGGACGAGAAGUCCAAG |
| | | GUGGAGUUCGCCUACUACAUCAACUGCGACUCCUCCAACGGCCGG |
| | | UUCUACCUGGCCUGGCACGACAAGGGCUCCAAGGAGCAGCAGUUC |
| | | CGGAUCUCCACCCAGAACCUGGUGCUGAUCCAGAAGUACCAGGUG |
| | | AACGAGCUGGGCAAGGAGAUCCGGCCCUGCCGGCUGAAGAAGCG |
| | | GCCCCCCGUGCGGUAG |
| 145 | Exemplary amino | MDGSGGGSPKKKRKVEDKRPAATKKAGQAKKKKGGSGGGEASPASG |
| | acid sequence for | PRHLMDPHIFTSNFNNGIGRHKTYLCYEVERLDNGTSVKMDQHRGFLH |
| | APOBEC3A- | NQAKNLLCGFYGRHAELRFLDLVPSLQLDPAQIYRVTWFISWSPCFSW |
| | Nme2D16A | GCAGEVRAFLQENTHVRLRIFAARIYDYDPLYKEALQMLRDAGAQVSI |
| | | MTYDEFKHCWDTFVDHQGCPFQPWDGLDEHSQALSGRLRAILQNQG |
| | | NSGSETPGTSESATPESAAFKPNPINYILGLAIGIASVGWAMVEIDEEEN |
| | | PIRLIDLGVRVFERAEVPKTGDSLAMARRLARSVRRLTRRRAHRLLRA |
| | | RRLLKREGVLQAADFDENGLIKSLPNTPWQLRAAALDRKLTPLEWSA |
| | | VLLHLIKHRGYLSQRKNEGETADKELGALLKGVANNAHALQTGDFRT |
| | | PAELALNKFEKESGHIRNQRGDYSHTFSRKDLQAELILLFEKQKEFGNP |
| | | HVSGGLKEGIETLLMTQRPALSGDAVQKMLGHCTFEPAEPKAAKNTY |
| | | TAERFIWLTKLNNLRILEQGSERPLTDTERATLMDEPYRKSKLTYAQA |
| | | RKLLGLEDTAFFKGLRYGKDNAEASTLMEMKAYHAISRALEKEGLKD |
| | | KKSPLNLSSELQDEIGTAFSLFKTDEDITGRLKDRVQPEILEALLKHISFD |
| | | KFVQISLKALRRIVPLMEQGKRYDEACAEIYGDHYGKKNTEEKIYLPPI |
| | | PADEIRNPVVLRALSQARKVINGVVRRYGSPARIHIETAREVGKSFKDR |
| | | KEIEKRQEENRKDREKAAAKFREYFPNFVGEPKSKDILKLRLYEQQHG |
| | | KCLYSGKEINLVRLNEKGYVEIDHALPFSRTWDDSFNNKVLVLGSENQ |
| | | NKGNQTPYEYFNGKDNSREWQEFKARVETSRFPRSKKQRILLQKFDED |
| | | GFKECNLNDTRYVNRFLCQFVADHILLTGKGKRRVFASNGQITNLLRG |
| | | FWGLRKVRAENDRHHALDAVVVACSTVAMQQKITRFVRYKEMNAFD |
| | | GKTIDKETGKVLHQKTHFPQPWEFFAQEVMIRVFGKPDGKPEFEEADT |
| | | PEKLRTLLAEKLSSRPEAVHEYVTPLFVSRAPNRKMSGAHKDTLRSAK |
| | | RFVKHNEKISVKRVWLTEIKLADLENMVNYKNGREIELYEALKARLEA |
| | | YGGNAKQAFDPKDNPFYKKGGQLVKAVRVEKTQESGVLLNKKNAYT |
| | | IADNGDMVRVDVFCKVDKKGKNQYFIVPIYAWQVAENILPDIDCKGY |
| | | RIDDSYTFCFSLHKYDLIAFQKDEKSKVEFAYYINCDSSNGRFYLAWH |
| | | DKGSKEQQFRISTQNLVLIQKYQVNELGKEIRPCRLKKRPPVR* |
| 146 | Exemplary amino | MDGSGGGSPKKKRKVEDKRPAATKKAGQAKKKKGGSGGGEASPASG |
| | acid sequence for | PRHLMDPHIFTSNFNNGIGRHKTYLCYEVERLDNGTSVKMDQHRGFLH |
| | NLS-NLS- | NQAKNLLCGFYGRHAELRFLDLVPSLQLDPAQIYRVTWFISWSPCFSW |
| | APOBEC3A- | GCAGEVRAFLQENTHVRLRIFAARIYDYDPLYKEALQMLRDAGAQVSI |
| | L070-Nme2D16A | MTYDEFKHCWDTFVDHQGCPFQPWDGLDEHSQALSGRLRAILQNQG |
| | | NGTKDSTKDIPETPSKDAAFKPNPINYILGLAIGIASVGWAMVEIDEEEN |
| | | PIRLIDLGVRVFERAEVPKTGDSLAMARRLARSVRRLTRRRAHRLLRA |
| | | RRLLKREGVLQAADFDENGLIKSLPNTPWQLRAAALDRKLTPLEWSA |
| | | VLLHLIKHRGYLSQRKNEGETADKELGALLKGVANNAHALQTGDFRT |
| | | PAELALNKFEKESGHIRNQRGDYSHTFSRKDLQAELILLFEKQKEFGNP |
| | | HVSGGLKEGIETLLMTQRPALSGDAVQKMLGHCTFEPAEPKAAKNTY |
| | | TAERFIWLTKLNNLRILEQGSERPLTDTERATLMDEPYRKSKLTYAQA |
| | | RKLLGLEDTAFFKGLRYGKDNAEASTLMEMKAYHAISRALEKEGLKD |
| | | KKSPLNLSSELQDEIGTAFSLFKTDEDITGRLKDRVQPEILEALLKHISFD |
| | | KFVQISLKALRRIVPLMEQGKRYDEACAEIYGDHYGKKNTEEKIYLPPI |
| | | PADEIRNPVVLRALSQARKVINGVVRRYGSPARIHIETAREVGKSFKDR |
| | | KEIEKRQEENRKDREKAAAKFREYFPNFVGEPKSKDILKLRLYEQQHG |
| | | KCLYSGKEINLVRLNEKGYVEIDHALPFSRTWDDSFNNKVLVLGSENQ |
| | | NKGNQTPYEYFNGKDNSREWQEFKARVETSRFPRSKKQRILLQKFDED |
| | | GFKECNLNDTRYVNRFLCQFVADHILLTGKGKRRVFASNGQITNLLRG |
| | | FWGLRKVRAENDRHHALDAVVVACSTVAMQQKITRFVRYKEMNAFD |
| | | GKTIDKETGKVLHQKTHFPQPWEFFAQEVMIRVFGKPDGKPEFEEADT |
| | | PEKLRTLLAEKLSSRPEAVHEYVTPLFVSRAPNRKMSGAHKDTLRSAK |
| | | RFVKHNEKISVKRVWLTEIKLADLENMVNYKNGREIELYEALKARLEA |
| | | YGGNAKQAFDPKDNPFYKKGGQLVKAVRVEKTQESGVLLNKKNAYT |
| | | IADNGDMVRVDVFCKVDKKGKNQYFIVPIYAWQVAENILPDIDCKGY |
| | | RIDDSYTFCFSLHKYDLIAFQKDEKSKVEFAYYINCDSSNGRFYLAWH |
| | | DKGSKEQQFRISTQNLVLIQKYQVNELGKEIRPCRLKKRPPVR |
| 147 | mRNA encoding | GGGAAGCUCAGAAUAAACGCUCAACUUUGGCCGGAUCUGCCACCA |
| | BC22- | UGGACGGCUCCGGCGGCGGCUCCCCCAAGAAGAAGCGGAAGGUGG |
| | Nme2D16A | AGGACAAGCGGCCCGCCGCCACCAAGAAGGCCGGCCAGGCCAAGA |
| | (Nme2 BC22n) | AGAAGAAGGGCGGCUCCGGCGGCGGCGAGGCCUCCCCCGCCUCCG |
| | | GCCCCCGGCACCUGAUGGACCCCCACAUCUUCACCUCCAACUUCA |
| | | ACAACGGCAUCGGCCGGCACAAGACCUACCUGUGCUACGAGGUGG |
| | | AGCGGCUGGACAACGGCACCUCCGUGAAGAUGGACCAGCACCGGG |
| | | GCUUCCUGCACAACCAGGCCAAGAACCUGCUGUGCGGCUUCUACG |
| | | GCCGGCACGCCGAGCUGCGGUUCCUGGACCUGGUGCCCUCCCUGC |
| | | AGCUGGACCCCGCCCAGAUCUACCGGGUGACCUGGUUCAUCUCCU |
| | | GGUCCCCCUGCUUCUCCUGGGGCUGCGCCGGCGAGGUGCGGGCCU |
| | | UCCUGCAGGAGAACACCCACGUGCGGCUGCGGAUCUUCGCCGCCC |
| | | GGAUCUACGACUACGACCCCCUGUACAAGGAGGCCCUGCAGAUGC |
| | | UGCGGGACGCCGGCGCCCAGGUGUCCAUCAUGACCUACGACGAGU |
| | | UCAAGCACUGCUGGGACACCUUCGUGGACCACCAGGGCUGCCCCU |
| | | UCCAGCCCUGGGACGGCCUGGACGAGCACUCCCAGGCCCUGUCCG |
| | | GCCGGCUGCGGGCCAUCCUGCAGAACCAGGGCAACUCCGGCUCCG |
| | | AGACCCCCGGCACCUCCGAGUCCGCCACCCCCGAGUCCGCAGCGU |
| | | UCAAACCAAAUCCCAUCAACUACAUCCUGGGCCUGGCCAUCGGCA |
| | | UCGCCUCCGUGGGCUGGGCCAUGGUGGAGAUCGACGAGGAGGAG |
| | | AACCCCAUCCGGCUGAUCGACCUGGGCGUGCGGGUGUUCGAGCGG |
| | | GCCGAGGUGCCCAAGACCGGCGACUCCCUGGCCAUGGCCCGGCGG |
| | | CUGGCCCGGUCCGUGCGGCGGCUGACCCGGCGGCGGGCCCACCGG |
| | | CUGCUGCGGGCCCGGCGGCUGCUGAAGCGGGAGGGCGUGCUGCAG |
| | | GCCGCCGACUUCGACGAGAACGGCCUGAUCAAGUCCCUGCCCAAC |
| | | ACCCCCUGGCAGCUGCGGGCCGCCGCCCUGGACCGGAAGCUGACC |
| | | CCCCUGGAGUGGUCCGCCGUGCUGCUGCACCUGAUCAAGCACCGG |
| | | GGCUACCUGUCCCAGCGGAAGAACGAGGGCGAGACCGCCGACAAG |
| | | GAGCUGGGCGCCCUGCUGAAGGGCGUGGCCAACAACGCCCACGCC |
| | | CUGCAGACCGGCGACUUCCGGACCCCCGCCGAGCUGGCCCUGAAC |
| | | AAGUUCGAGAAGGAGUCCGGCCACAUCCGGAACCAGCGGGGCGAC |
| | | UACUCCCACACCUUCUCCCGGAAGGACCUGCAGGCCGAGCUGAUC |
| | | CUGCUGUUCGAGAAGCAGAAGGAGUUCGGCAACCCCCACGUGUCC |
| | | GGCGGCCUGAAGGAGGGCAUCGAGACCCUGCUGAUGACCCAGCGG |
| | | CCCGCCCUGUCCGGCGACGCCGUGCAGAAGAUGCUGGGCCACUGC |
| | | ACCUUCGAGCCCGCCGAGCCCAAGGCCGCCAAGAACACCUACACC |
| | | GCCGAGCGGUUCAUCUGGCUGACCAAGCUGAACAACCUGCGGAUC |
| | | CUGGAGCAGGGCUCCGAGCGGCCCCUGACCGACACCGAGCGGGCC |
| | | ACCCUGAUGGACGAGCCCUACCGGAAGUCCAAGCUGACCUACGCC |
| | | CAGGCCCGGAAGCUGCUGGGCCUGGAGGACACCGCCUUCUUCAAG |
| | | GGCCUGCGGUACGGCAAGGACAACGCCGAGGCCUCCACCCUGAUG |
| | | GAGAUGAAGGCCUACCACGCCAUCUCCCGGGCCCUGGAGAAGGAG |
| | | GGCCUGAAGGACAAGAAGUCCCCCCUGAACCUGUCCUCCGAGCUG |
| | | CAGGACGAGAUCGGCACCGCCUUCUCCCUGUUCAAGACCGACGAG |
| | | GACAUCACCGGCCGGCUGAAGGACCGGGUGCAGCCCGAGAUCCUG |
| | | GAGGCCCUGCUGAAGCACAUCUCCUUCGACAAGUUCGUGCAGAUC |
| | | UCCCUGAAGGCCCUGCGGCGGAUCGUGCCCCUGAUGGAGCAGGGC |
| | | AAGCGGUACGACGAGGCCUGCGCCGAGAUCUACGGCGACCACUAC |
| | | GGCAAGAAGAACACCGAGGAGAAGAUCUACCUGCCCCCCAUCCCC |
| | | GCCGACGAGAUCCGGAACCCCGUGGUGCUGCGGGCCCUGUCCCAG |
| | | GCCCGGAAGGUGAUCAACGGCGUGGUGCGGCGGUACGGCUCCCCC |
| | | GCCCGGAUCCACAUCGAGACCGCCCGGGAGGUGGGCAAGUCCUUC |
| | | AAGGACCGGAAGGAGAUCGAGAAGCGGCAGGAGGAGAACCGGAA |
| | | GGACCGGGAGAAGGCCGCCGCCAAGUUCCGGGAGUACUUCCCCAA |
| | | CUUCGUGGGCGAGCCCAAGUCCAAGGACAUCCUGAAGCUGCGGCU |
| | | GUACGAGCAGCAGCACGGCAAGUGCCUGUACUCCGGCAAGGAGA |
| | | UCAACCUGGUGCGGCUGAACGAGAAGGGCUACGUGGAGAUCGAC |
| | | CACGCCCUGCCCUUCUCCCGGACCUGGGACGACUCCUUCAACAAC |
| | | AAGGUGCUGGUGCUGGGCUCCGAGAACCAGAACAAGGGCAACCA |
| | | GACCCCCUACGAGUACUUCAACGGCAAGGACAACUCCCGGGAGUG |
| | | GCAGGAGUUCAAGGCCCGGGUGGAGACCUCCCGGUUCCCCCGGUC |
| | | CAAGAAGCAGCGGAUCCUGCUGCAGAAGUUCGACGAGGACGGCU |
| | | UCAAGGAGUGCAACCUGAACGACACCCGGUACGUGAACCGCUUCC |
| | | UGUGCCAGUUCGUGGCCGACCACAUCCUGCUGACCGGCAAGGGCA |
| | | AGCGGCGGGUGUUCGCCUCCAACGGCCAGAUCACCAACCUGCUGC |
| | | GGGGCUUCUGGGGCCUGCGGAAGGUGCGGGCCGAGAACGACCGG |
| | | CACCACGCCCUGGACGCCGUGGUGGUGGCCUGCUCCACCGUGGCC |
| | | AUGCAGCAGAAGAUCACCCGGUUCGUGCGGUACAAGGAGAUGAA |
| | | CGCCUUCGACGGCAAGACCAUCGACAAGGAGACCGGCAAGGUGCU |
| | | GCACCAGAAGACCCACUUCCCCCAGCCCUGGGAGUUCUUCGCCCA |
| | | GGAGGUGAUGAUCCGGGUGUUCGGCAAGCCCGACGGCAAGCCCG |
| | | AGUUCGAGGAGGCCGACACCCCCGAGAAGCUGCGGACCCUGCUGG |
| | | CCGAGAAGCUGUCCUCCCGGCCCGAGGCCGUGCACGAGUACGUGA |
| | | CCCCCCUGUUCGUGUCCCGGGCCCCCAACCGGAAGAUGUCCGGCG |
| | | CCCACAAGGACACCCUGCGGUCCGCCAAGCGGUUCGUGAAGCACA |
| | | ACGAGAAGAUCUCCGUGAAGCGGGUGUGGCUGACCGAGAUCAAG |
| | | CUGGCCGACCUGGAGAACAUGGUGAACUACAAGAACGGCCGGGA |
| | | GAUCGAGCUGUACGAGGCCCUGAAGGCCCGGCUGGAGGCCUACGG |
| | | CGGCAACGCCAAGCAGGCCUUCGACCCCAAGGACAACCCCUUCUA |
| | | CAAGAAGGGCGGCCAGCUGGUGAAGGCCGUGCGGGUGGAGAAGA |
| | | CCCAGGAGUCCGGCGUGCUGCUGAACAAGAAGAACGCCUACACCA |
| | | UCGCCGACAACGGCGACAUGGUGCGGGUGGACGUGUUCUGCAAG |
| | | GUGGACAAGAAGGGCAAGAACCAGUACUUCAUCGUGCCCAUCUA |
| | | CGCCUGGCAGGUGGCCGAGAACAUCCUGCCCGACAUCGACUGCAA |
| | | GGGCUACCGGAUCGACGACUCCUACACCUUCUGCUUCUCCCUGCA |
| | | CAAGUACGACCUGAUCGCCUUCCAGAAGGACGAGAAGUCCAAGG |
| | | UGGAGUUCGCCUACUACAUCAACUGCGACUCCUCCAACGGCCGGU |
| | | UCUACCUGGCCUGGCACGACAAGGGCUCCAAGGAGCAGCAGUUCC |
| | | GGAUCUCCACCCAGAACCUGGUGCUGAUCCAGAAGUACCAGGUGA |
| | | ACGAGCUGGGCAAGGAGAUCCGGCCCUGCCGGCUGAAGAAGCGGC |
| | | CCCCCGUGCGGUAGUGACUAGCACCAGCCUCAAGAACACCCGAAU |
| | | GGAGUCUCUAAGCUACAUAAUACCAACUUACACUUUACAAAAUG |
| | | UUGUCCCCCAAAAUGUAGCCAUUCGUAUCUGCUCCUAAUAAAAA |
| | | GAAAGUUUCUUCACAUUCUCUCGAGAAAAAAAAAAAAUGGAAAA |
| | | AAAAAAAACGGAAAAAAAAAAAGGUAAAAAAAAAAAAUAUAAAA |
| | | AAAAAAACAUAAAAAAAAAAAACGAAAAAAAAAAAACGUAAAAA |
| | | AAAAAAACUCAAAAAAAAAAAGAUAAAAAAAAAAAACCUAAAAA |
| | | AAAAAAAUGUAAAAAAAAAAAAGGGAAAAAAAAAAACGCAAAAA |
| | | AAAAAAACACAAAAAAAAAAAAUGCAAAAAAAAAAAAUCGAAAA |
| | | AAAAAAAAUCUAAAAAAAAAAAACGAAAAAAAAAAAACCCAAAA |
| | | AAAAAAAAGACAAAAAAAAAAAAUAGAAAAAAAAAAAGUUAAAA |
| | | AAAAAAAACUGAAAAAAAAAAAAUUUAAAAAAAAAAAAUCUAG |
| 148 | Amino acid | MEASPASGPRHLMDPHIFTSNFNNGIGRHKTYLCYEVERLDNGTSVKM |
| | sequence for base | DQHRGFLHNQAKNLLCGFYGRHAELRFLDLVPSLQLDPAQIYRVTWFI |
| | editor with linker | SWSPCFSWGCAGEVRAFLQENTHVRLRIFAARIYDYDPLYKEALQMLR |
| | L070 | DAGAQVSIMTYDEFKHCWDTFVDHQGCPFQPWDGLDEHSQALSGRL |
| | | RAILQNQGNGTKDSTKDIPETPSKDDKKYSIGLAIGTNSVGWAVITDEY |
| | | KVPSKKFKVLGNTDRHSIKKNLIGALLFDSGETAEATRLKRTARRRYT |
| | | RRKNRICYLQEIFSNEMAKVDDSFFHRLEESFLVEEDKKHERHPIFGNIV |
| | | DEVAYHEKYPTIYHLRKKLVDSTDKADLRLIYLALAHMIKFRGHFLIE |
| | | GDLNPDNSDVDKLFIQLVQTYNQLFEENPINASGVDAKAILSARLSKSR |
| | | RLENLIAQLPGEKKNGLFGNLIALSLGLTPNFKSNFDLAEDAKLQLSKD |
| | | TYDDDLDNLLAQIGDQYADLFLAAKNLSDAILLSDILRVNTEITKAPLS |
| | | ASMIKRYDEHHQDLTLLKALVRQQLPEKYKEIFFDQSKNGYAGYIDGG |
| | | ASQEEFYKFIKPILEKMDGTEELLVKLNREDLLRKQRTFDNGSIPHQIHL |
| | | GELHAILRRQEDFYPFLKDNREKIEKILTFRIPYYVGPLARGNSRFAWM |
| | | TRKSEETITPWNFEEVVDKGASAQSFIERMTNFDKNLPNEKVLPKHSLL |
| | | YEYFTVYNELTKVKYVTEGMRKPAFLSGEQKKAIVDLLFKTNRKVTV |
| | | KQLKEDYFKKIECFDSVEISGVEDRFNASLGTYHDLLKIIKDKDFLDNE |
| | | ENEDILEDIVLTLTLFEDREMIEERLKTYAHLFDDKVMKQLKRRRYTG |
| | | WGRLSRKLINGIRDKQSGKTILDFLKSDGFANRNFMQLIHDDSLTFKED |
| | | IQKAQVSGQGDSLHEHIANLAGSPAIKKGILQTVKVVDELVKVMGRHK |
| | | PENIVIEMARENQTTQKGQKNSRERMKRIEEGIKELGSQILKEHPVENT |
| | | QLQNEKLYLYYLQNGRDMYVDQELDINRLSDYDVDHIVPQSFLKDDSI |
| | | DNKVLTRSDKNRGKSDNVPSEEVVKKMKNYWRQLLNAKLITQRKFD |
| | | NLTKAERGGLSELDKAGFIKRQLVETRQITKHVAQILDSRMNTKYDEN |
| | | DKLIREVKVITLKSKLVSDFRKDFQFYKVREINNYHHAHDAYLNAVVG |
| | | TALIKKYPKLESEFVYGDYKVYDVRKMIAKSEQEIGKATAKYFFYSNI |
| | | MNFFKTEITLANGEIRKRPLIETNGETGEIVWDKGRDFATVRKVLSMPQ |
| | | VNIVKKTEVQTGGFSKESILPKRNSDKLIARKKDWDPKKYGGFDSPTV |
| | | AYSVLVVAKVEKGKSKKLKSVKELLGITIMERSSFEKNPIDFLEAKGYK |
| | | EVKKDLIIKLPKYSLFELENGRKRMLASAGELQKGNELALPSKYVNFL |
| | | YLASHYEKLKGSPEDNEQKQLFVEQHKHYLDEIIEQISEFSKRVILADA |
| | | NLDKVLSAYNKHRDKPIREQAENIIHLFTLTNLGAPAAFKYFDTTIDRK |
| | | RYTSTKEVLDATLIHQSITGLYETRIDLSQLGGDGGGSPKKKRKV |
| 149 | amino acid | MAAFKPNPINYILGLAIGIASVGWAMVEIDEEENPIRLIDLGVRVFERAE |
| | sequence for | VPKTGDSLAMARRLARSVRRLTRRRAHRLLRARRLLKREGVLQAADF |
| | D16A Nme2Cas9 | DENGLIKSLPNTPWQLRAAALDRKLTPLEWSAVLLHLIKHRGYLSQRK |
| | nickase | NEGETADKELGALLKGVANNAHALQTGDFRTPAELALNKFEKESGHI |
| | | RNQRGDYSHTFSRKDLQAELILLFEKQKEFGNPHVSGGLKEGIETLLMT |
| | | QRPALSGDAVQKMLGHCTFEPAEPKAAKNTYTAERFIWLTKLNNLRIL |
| | | EQGSERPLTDTERATLMDEPYRKSKLTYAQARKLLGLEDTAFFKGLRY |
| | | GKDNAEASTLMEMKAYHAISRALEKEGLKDKKSPLNLSSELQDEIGTA |
| | | FSLFKTDEDITGRLKDRVQPEILEALLKHISFDKFVQISLKALRRIVPLME |
| | | QGKRYDEACAEIYGDHYGKKNTEEKIYLPPIPADEIRNPVVLRALSQAR |
| | | KVINGVVRRYGSPARIHIETAREVGKSFKDRKEIEKRQEENRKDREKA |
| | | AAKFREYFPNFVGEPKSKDILKLRLYEQQHGKCLYSGKEINLVRLNEK |
| | | GYVEIDHALPFSRTWDDSFNNKVLVLGSENQNKGNQTPYEYFNGKDN |
| | | SREWQEFKARVETSRFPRSKKQRILLQKFDEDGFKECNLNDTRYVNRF |
| | | LCQFVADHILLTGKGKRRVFASNGQITNLLRGFWGLRKVRAENDRHH |
| | | ALDAVVVACSTVAMQQKITRFVRYKEMNAFDGKTIDKETGKVLHQK |
| | | THFPQPWEFFAQEVMIRVFGKPDGKPEFEEADTPEKLRTLLAEKLSSRP |
| | | EAVHEYVTPLFVSRAPNRKMSGAHKDTLRSAKRFVKHNEKISVKRVW |
| | | LTEIKLADLENMVNYKNGREIELYEALKARLEAYGGNAKQAFDPKDN |
| | | PFYKKGGQLVKAVRVEKTQESGVLLNKKNAYTIADNGDMVRVDVFC |
| | | KVDKKGKNQYFIVPIYAWQVAENILPDIDCKGYRIDDSYTFCFSLHKY |
| | | DLIAFQKDEKSKVEFAYYINCDSSNGRFYLAWHDKGSKEQQFRISTQN |
| | | LVLIQKYQVNELGKEIRPCRLKKRPPVR |
| 150 | coding sequence | GCTGCTTTTAAGCCTAATCCTATTAATTATATTCTTGGTCTTGCTATT |
| | for D16A | GGTATTGCTTCTGTTGGTTGGGCTATGGTTGAGATTGATGAGGAGG |
| | Nme2Cas9 | AGAATCCTATTCGTCTTATTGATCTTGGTGTTCGTGTTTTTGAGCGT |
| | nickase | GCTGAGGTTCCTAAGACTGGTGATTCTCTTGCTATGGCTCGTCGTCT |
| | | TGCTCGTTCTGTTCGTCGTCTTACTCGTCGTCGTGCTCATCGTCTTCT |
| | | TCGTGCTCGTCGTCTTCTTAAGCGTGAGGGTGTTCTTCAGGCTGCTG |
| | | ATTTTGATGAGAATGGTCTTATTAAGTCTCTTCCTAATACTCCTTGG |
| | | CAGCTTCGTGCTGCTGCTCTTGATCGTAAGCTTACTCCTCTTGAGTG |
| | | GTCTGCTGTTCTTCTTCATCTTATTAAGCATCGTGGTTATCTTTCTCA |
| | | GCGTAAGAATGAGGGTGAGACTGCTGATAAGGAGCTTGGTGCTCTT |
| | | CTTAAGGGTGTTGCTAATAATGCTCATGCTCTTCAGACTGGTGATTT |
| | | TCGTACTCCTGCTGAGCTTGCTCTTAATAAGTTTGAGAAGGAGTCTG |
| | | GTCATATTCGTAATCAGCGTGGTGATTATTCTCATACTTTTTCTCGT |
| | | AAGGATCTTCAGGCTGAGCTTATTCTTCTTTTTGAGAAGCAGAAGG |
| | | AGTTTGGTAATCCTCATGTTTCTGGTGGTCTTAAGGAGGGTATTGAG |
| | | ACTCTTCTTATGACTCAGCGTCCTGCTCTTTCTGGTGATGCTGTTCA |
| | | GAAGATGCTTGGTCATTGTACTTTTGAGCCTGCTGAGCCTAAGGCTG |
| | | CTAAGAATACTTATACTGCTGAGCGTTTTATTTGGCTTACTAAGCTT |
| | | AATAATCTTCGTATTCTTGAGCAGGGTTCTGAGCGTCCTCTTACTGA |
| | | TACTGAGCGTGCTACTCTTATGGATGAGCCTTATCGTAAGTCTAAGC |
| | | TTACTTATGCTCAGGCTCGTAAGCTTCTTGGTCTTGAGGATACTGCT |
| | | TTTTTTAAGGGTCTTCGTTATGGTAAGGATAATGCTGAGGCTTCTAC |
| | | TCTTATGGAGATGAAGGCTTATCATGCTATTTCTCGTGCTCTTGAGA |
| | | AGGAGGGTCTTAAGGATAAGAAGTCTCCTCTTAATCTTTCTTCTGAG |
| | | CTTCAGGATGAGATTGGTACTGCTTTTTCTCTTTTTAAGACTGATGA |
| | | GGATATTACTGGTCGTCTTAAGGATCGTGTTCAGCCTGAGATTCTTG |
| | | AGGCTCTTCTTAAGCATATTTCTTTTGATAAGTTTGTTCAGATTTCTC |
| | | TTAAGGCTCTTCGTCGTATTGTTCCTCTTATGGAGCAGGGTAAGCGT |
| | | TATGATGAGGCTTGTGCTGAGATTTATGGTGATCATTATGGTAAGA |
| | | AGAATACTGAGGAGAAGATTTATCTTCCTCCTATTCCTGCTGATGAG |
| | | ATTCGTAATCCTGTTGTTCTTCGTGCTCTTTCTCAGGCTCGTAAGGTT |
| | | ATTAATGGTGTTGTTCGTCGTTATGGTTCTCCTGCTCGTATTCATATT |
| | | GAGACTGCTCGTGAGGTTGGTAAGTCTTTTAAGGATCGTAAGGAGA |
| | | TTGAGAAGCGTCAGGAGGAGAATCGTAAGGATCGTGAGAAGGCTG |
| | | CTGCTAAGTTTCGTGAGTATTTTCCTAATTTTGTTGGTGAGCCTAAG |
| | | TCTAAGGATATTCTTAAGCTTCGTCTTTATGAGCAGCAGCATGGTAA |
| | | GTGTCTTTATTCTGGTAAGGAGATTAATCTTGTTCGTCTTAATGAGA |
| | | AGGGTTATGTTGAGATTGATCATGCTCTTCCTTTTTCTCGTACTTGG |
| | | GATGATTCTTTTAATAATAAGGTTCTTGTTCTTGGTTCTGAGAATCA |
| | | GAATAAGGGTAATCAGACTCCTTATGAGTATTTTAATGGTAAGGAT |
| | | AATTCTCGTGAGTGGCAGGAGTTTAAGGCTCGTGTTGAGACTTCTC |
| | | GTTTTCCTCGTTCTAAGAAGCAGCGTATTCTTCTTCAGAAGTTTGAT |
| | | GAGGATGGTTTTAAGGAGTGTAATCTTAATGATACTCGTTATGTTAA |
| | | TCGTTTTCTTTGTCAGTTTGTTGCTGATCATATTCTTCTTACTGGTAA |
| | | GGGTAAGCGTCGTGTTTTTGCTTCTAATGGTCAGATTACTAATCTTC |
| | | TTCGTGGTTTTTGGGGTCTTCGTAAGGTTCGTGCTGAGAATGATCGT |
| | | CATCATGCTCTTGATGCTGTTGTTGTTGCTTGTTCTACTGTTGCTATG |
| | | CAGCAGAAGATTACTCGTTTTGTTCGTTATAAGGAGATGAATGCTTT |
| | | TGATGGTAAGACTATTGATAAGGAGACTGGTAAGGTTCTTCATCAG |
| | | AAGACTCATTTTCCTCAGCCTTGGGAGTTTTTTGCTCAGGAGGTTAT |
| | | GATTCGTGTTTTTGGTAAGCCTGATGGTAAGCCTGAGTTTGAGGAG |
| | | GCTGATACTCCTGAGAAGCTTCGTACTCTTCTTGCTGAGAAGCTTTC |
| | | TTCTCGTCCTGAGGCTGTTCATGAGTATGTTACTCCTCTTTTTGTTTC |
| | | TCGTGCTCCTAATCGTAAGATGTCTGGTGCTCATAAGGATACTCTTC |
| | | GTTCTGCTAAGCGTTTTGTTAAGCATAATGAGAAGATTTCTGTTAAG |
| | | CGTGTTTGGCTTACTGAGATTAAGCTTGCTGATCTTGAGAATATGGT |
| | | TAATTATAAGAATGGTCGTGAGATTGAGCTTTATGAGGCTCTTAAG |
| | | GCTCGTCTTGAGGCTTATGGTGGTAATGCTAAGCAGGCTTTTGATCC |
| | | TAAGGATAATCCTTTTTATAAGAAGGGTGGTCAGCTTGTTAAGGCT |
| | | GTTCGTGTTGAGAAGACTCAGGAGTCTGGTGTTCTTCTTAATAAGA |
| | | AGAATGCTTATACTATTGCTGATAATGGTGATATGGTTCGTGTTGAT |
| | | GTTTTTTGTAAGGTTGATAAGAAGGGTAAGAATCAGTATTTTATTGT |
| | | TCCTATTTATGCTTGGCAGGTTGCTGAGAATATTCTTCCTGATATTG |
| | | ATTGTAAGGGTTATCGTATTGATGATTCTTATACTTTTTGTTTTTCTC |
| | | TTCATAAGTATGATCTTATTGCTTTTCAGAAGGATGAGAAGTCTAAG |
| | | GTTGAGTTTGCTTATTATATTAATTGTGATTCTTCTAATGGTCGTTTT |
| | | TATCTTGCTTGGCATGATAAGGGTTCTAAGGAGCAGCAGTTTCGTAT |
| | | TTCTACTCAGAATCTTGTTCTTATTCAGAAGTATCAGGTTAATGAGC |
| | | TTGGTAAGGAGATTCGTCCTTGTCGTCTTAAGAAGCGTCCTCCTGTT |
| | | CGT |
| 151 | coding sequence | GCCGCCTTCAAGCCCAACCCCATCAACTACATCCTGGGCCTGGCCA |
| | for D16A | TCGGCATCGCCTCCGTGGGCTGGGCCATGGTGGAGATCGACGAGGA |
| | Nme2Cas9 | GGAGAACCCCATCCGGCTGATCGACCTGGGCGTGCGGGTGTTCGAG |
| | nickase | CGGGCCGAGGTGCCCAAGACCGGCGACTCCCTGGCCATGGCCCGGC |
| | | GGCTGGCCCGGTCCGTGCGGCGGCTGACCCGGCGGCGGGCCCACCG |
| | | GCTGCTGCGGGCCCGGCGGCTGCTGAAGCGGGAGGGCGTGCTGCA |
| | | GGCCGCCGACTTCGACGAGAACGGCCTGATCAAGTCCCTGCCCAAC |
| | | ACCCCCTGGCAGCTGCGGGCCGCCGCCCTGGACCGGAAGCTGACCC |
| | | CCCTGGAGTGGTCCGCCGTGCTGCTGCACCTGATCAAGCACCGGGG |
| | | CTACCTGTCCCAGCGGAAGAACGAGGGCGAGACCGCCGACAAGGA |
| | | GCTGGGCGCCCTGCTGAAGGGCGTGGCCAACAACGCCCACGCCCTG |
| | | CAGACCGGCGACTTCCGGACCCCCGCCGAGCTGGCCCTGAACAAGT |
| | | TCGAGAAGGAGTCCGGCCACATCCGGAACCAGCGGGGCGACTACT |
| | | CCCACACCTTCTCCCGGAAGGACCTGCAGGCCGAGCTGATCCTGCT |
| | | GTTCGAGAAGCAGAAGGAGTTCGGCAACCCCCACGTGTCCGGCGGC |
| | | CTGAAGGAGGGCATCGAGACCCTGCTGATGACCCAGCGGCCCGCCC |
| | | TGTCCGGCGACGCCGTGCAGAAGATGCTGGGCCACTGCACCTTCGA |
| | | GCCCGCCGAGCCCAAGGCCGCCAAGAACACCTACACCGCCGAGCG |
| | | GTTCATCTGGCTGACCAAGCTGAACAACCTGCGGATCCTGGAGCAG |
| | | GGCTCCGAGCGGCCCCTGACCGACACCGAGCGGGCCACCCTGATGG |
| | | ACGAGCCCTACCGGAAGTCCAAGCTGACCTACGCCCAGGCCCGGAA |
| | | GCTGCTGGGCCTGGAGGACACCGCCTTCTTCAAGGGCCTGCGGTAC |
| | | GGCAAGGACAACGCCGAGGCCTCCACCCTGATGGAGATGAAGGCC |
| | | TACCACGCCATCTCCCGGGCCCTGGAGAAGGAGGGCCTGAAGGAC |
| | | AAGAAGTCCCCCCTGAACCTGTCCTCCGAGCTGCAGGACGAGATCG |
| | | GCACCGCCTTCTCCCTGTTCAAGACCGACGAGGACATCACCGGCCG |
| | | GCTGAAGGACCGGGTGCAGCCCGAGATCCTGGAGGCCCTGCTGAA |
| | | GCACATCTCCTTCGACAAGTTCGTGCAGATCTCCCTGAAGGCCCTGC |
| | | GGCGGATCGTGCCCCTGATGGAGCAGGGCAAGCGGTACGACGAGG |
| | | CCTGCGCCGAGATCTACGGCGACCACTACGGCAAGAAGAACACCG |
| | | AGGAGAAGATCTACCTGCCCCCCATCCCCGCCGACGAGATCCGGAA |
| | | CCCCGTGGTGCTGCGGGCCCTGTCCCAGGCCCGGAAGGTGATCAAC |
| | | GGCGTGGTGCGGCGGTACGGCTCCCCCGCCCGGATCCACATCGAGA |
| | | CCGCCCGGGAGGTGGGCAAGTCCTTCAAGGACCGGAAGGAGATCG |
| | | AGAAGCGGCAGGAGGAGAACCGGAAGGACCGGGAGAAGGCCGCC |
| | | GCCAAGTTCCGGGAGTACTTCCCCAACTTCGTGGGCGAGCCCAAGT |
| | | CCAAGGACATCCTGAAGCTGCGGCTGTACGAGCAGCAGCACGGCA |
| | | AGTGCCTGTACTCCGGCAAGGAGATCAACCTGGTGCGGCTGAACGA |
| | | GAAGGGCTACGTGGAGATCGACCACGCCCTGCCCTTCTCCCGGACC |
| | | TGGGACGACTCCTTCAACAACAAGGTGCTGGTGCTGGGCTCCGAGA |
| | | ACCAGAACAAGGGCAACCAGACCCCCTACGAGTACTTCAACGGCA |
| | | AGGACAACTCCCGGGAGTGGCAGGAGTTCAAGGCCCGGGTGGAGA |
| | | CCTCCCGGTTCCCCCGGTCCAAGAAGCAGCGGATCCTGCTGCAGAA |
| | | GTTCGACGAGGACGGCTTCAAGGAGTGCAACCTGAACGACACCCG |
| | | GTACGTGAACCGGTTCCTGTGCCAGTTCGTGGCCGACCACATCCTG |
| | | CTGACCGGCAAGGGCAAGCGGCGGGTGTTCGCCTCCAACGGCCAG |
| | | ATCACCAACCTGCTGCGGGGCTTCTGGGGCCTGCGGAAGGTGCGGG |
| | | CCGAGAACGACCGGCACCACGCCCTGGACGCCGTGGTGGTGGCCTG |
| | | CTCCACCGTGGCCATGCAGCAGAAGATCACCCGGTTCGTGCGGTAC |
| | | AAGGAGATGAACGCCTTCGACGGCAAGACCATCGACAAGGAGACC |
| | | GGCAAGGTGCTGCACCAGAAGACCCACTTCCCCCAGCCCTGGGAGT |
| | | TCTTCGCCCAGGAGGTGATGATCCGGGTGTTCGGCAAGCCCGACGG |
| | | CAAGCCCGAGTTCGAGGAGGCCGACACCCCCGAGAAGCTGCGGAC |
| | | CCTGCTGGCCGAGAAGCTGTCCTCCCGGCCCGAGGCCGTGCACGAG |
| | | TACGTGACCCCCCTGTTCGTGTCCCGGGCCCCCAACCGGAAGATGT |
| | | CCGGCGCCCACAAGGACACCCTGCGGTCCGCCAAGCGGTTCGTGAA |
| | | GCACAACGAGAAGATCTCCGTGAAGCGGGTGTGGCTGACCGAGAT |
| | | CAAGCTGGCCGACCTGGAGAACATGGTGAACTACAAGAACGGCCG |
| | | GGAGATCGAGCTGTACGAGGCCCTGAAGGCCCGGCTGGAGGCCTA |
| | | CGGCGGCAACGCCAAGCAGGCCTTCGACCCCAAGGACAACCCCTTC |
| | | TACAAGAAGGGCGGCCAGCTGGTGAAGGCCGTGCGGGTGGAGAAG |
| | | ACCCAGGAGTCCGGCGTGCTGCTGAACAAGAAGAACGCCTACACC |
| | | ATCGCCGACAACGGCGACATGGTGCGGGTGGACGTGTTCTGCAAGG |
| | | TGGACAAGAAGGGCAAGAACCAGTACTTCATCGTGCCCATCTACGC |
| | | CTGGCAGGTGGCCGAGAACATCCTGCCCGACATCGACTGCAAGGGC |
| | | TACCGGATCGACGACTCCTACACCTTCTGCTTCTCCCTGCACAAGTA |
| | | CGACCTGATCGCCTTCCAGAAGGACGAGAAGTCCAAGGTGGAGTTC |
| | | GCCTACTACATCAACTGCGACTCCTCCAACGGCCGGTTCTACCTGGC |
| | | CTGGCACGACAAGGGCTCCAAGGAGCAGCAGTTCCGGATCTCCACC |
| | | CAGAACCTGGTGCTGATCCAGAAGTACCAGGTGAACGAGCTGGGC |
| | | AAGGAGATCCGGCCCTGCCGGCTGAAGAAGCGGCCCCCCGTGCGG |
| 152 | coding sequence | GCCGCCTTCAAGCCCAACCCCATCAACTACATCCTGGGCCTGGCCA |
| | for D16A | TCGGCATCGCCTCCGTGGGCTGGGCCATGGTGGAGATCGACGAGGA |
| | Nme2Cas9 | GGAGAACCCCATCCGGCTGATCGACCTGGGCGTGCGGGTGTTCGAG |
| | nickase | CGGGCCGAGGTGCCCAAGACCGGCGACTCCCTGGCCATGGCCCGGC |
| | | GGCTGGCCCGGTCCGTGCGGCGGCTGACCCGGCGGCGGGCCCACCG |
| | | GCTGCTGCGGGCCCGGCGGCTGCTGAAGCGGGAGGGCGTGCTGCA |
| | | GGCCGCCGACTTCGACGAGAACGGCCTGATCAAGTCCCTGCCCAAC |
| | | ACCCCCTGGCAGCTGCGGGCCGCCGCCCTGGACCGGAAGCTGACCC |
| | | CCCTGGAGTGGTCCGCCGTGCTGCTGCACCTGATCAAGCACCGGGG |
| | | CTACCTGTCCCAGCGGAAGAACGAGGGCGAGACCGCCGACAAGGA |
| | | GCTGGGCGCCCTGCTGAAGGGCGTGGCCAACAACGCCCACGCCCTG |
| | | CAGACCGGCGACTTCCGGACCCCCGCCGAGCTGGCCCTGAACAAGT |
| | | TCGAGAAGGAGTCCGGCCACATCCGGAACCAGCGGGGCGACTACT |
| | | CCCACACCTTCTCCCGGAAGGACCTGCAGGCCGAGCTGATCCTGCT |
| | | GTTCGAGAAGCAGAAGGAGTTCGGCAACCCCCACGTGTCCGGCGGC |
| | | CTGAAGGAGGGCATCGAGACCCTGCTGATGACCCAGCGGCCCGCCC |
| | | TGTCCGGCGACGCCGTGCAGAAGATGCTGGGCCACTGCACCTTCGA |
| | | GCCCGCCGAGCCCAAGGCCGCCAAGAACACCTACACCGCCGAGCG |
| | | GTTCATCTGGCTGACCAAGCTGAACAACCTGCGGATCCTGGAGCAG |
| | | GGCTCCGAGCGGCCCCTGACCGACACCGAGCGGGCCACCCTGATGG |
| | | ACGAGCCCTACCGGAAGTCCAAGCTGACCTACGCCCAGGCCCGGAA |
| | | GCTGCTGGGCCTGGAGGACACCGCCTTCTTCAAGGGCCTGCGGTAC |
| | | GGCAAGGACAACGCCGAGGCCTCCACCCTGATGGAGATGAAGGCC |
| | | TACCACGCCATCTCCCGGGCCCTGGAGAAGGAGGGCCTGAAGGAC |
| | | AAGAAGTCCCCCCTGAACCTGTCCTCCGAGCTGCAGGACGAGATCG |
| | | GCACCGCCTTCTCCCTGTTCAAGACCGACGAGGACATCACCGGCCG |
| | | GCTGAAGGACCGGGTGCAGCCCGAGATCCTGGAGGCCCTGCTGAA |
| | | GCACATCTCCTTCGACAAGTTCGTGCAGATCTCCCTGAAGGCCCTGC |
| | | GGCGGATCGTGCCCCTGATGGAGCAGGGCAAGCGGTACGACGAGG |
| | | CCTGCGCCGAGATCTACGGCGACCACTACGGCAAGAAGAACACCG |
| | | AGGAGAAGATCTACCTGCCCCCCATCCCCGCCGACGAGATCCGGAA |
| | | CCCCGTGGTGCTGCGGGCCCTGTCCCAGGCCCGGAAGGTGATCAAC |
| | | GGCGTGGTGCGGCGGTACGGCTCCCCCGCCCGGATCCACATCGAGA |
| | | CCGCCCGGGAGGTGGGCAAGTCCTTCAAGGACCGGAAGGAGATCG |
| | | AGAAGCGGCAGGAGGAGAACCGGAAGGACCGGGAGAAGGCCGCC |
| | | GCCAAGTTCCGGGAGTACTTCCCCAACTTCGTGGGCGAGCCCAAGT |
| | | CCAAGGACATCCTGAAGCTGCGGCTGTACGAGCAGCAGCACGGCA |
| | | AGTGCCTGTACTCCGGCAAGGAGATCAACCTGGTGCGGCTGAACGA |
| | | GAAGGGCTACGTGGAGATCGACCACGCCCTGCCCTTCTCCCGGACC |
| | | TGGGACGACTCCTTCAACAACAAGGTGCTGGTGCTGGGCTCCGAGA |
| | | ACCAGAACAAGGGCAACCAGACCCCCTACGAGTACTTCAACGGCA |
| | | AGGACAACTCCCGGGAGTGGCAGGAGTTCAAGGCCCGGGTGGAGA |
| | | CCTCCCGGTTCCCCCGGTCCAAGAAGCAGCGGATCCTGCTGCAGAA |
| | | GTTCGACGAGGACGGCTTCAAGGAGTGCAACCTGAACGACACCCG |
| | | GTACGTGAACCGGTTCCTGTGCCAGTTCGTGGCCGACCACATCCTG |
| | | CTGACCGGCAAGGGCAAGCGGCGGGTGTTCGCCTCCAACGGCCAG |
| | | ATCACCAACCTGCTGCGGGGCTTCTGGGGCCTGCGGAAGGTGCGGG |
| | | CCGAGAACGACCGGCACCACGCCCTGGACGCCGTGGTGGTGGCCTG |
| | | CTCCACCGTGGCCATGCAGCAGAAGATCACCCGGTTCGTGCGGTAC |
| | | AAGGAGATGAACGCCTTCGACGGCAAGACCATCGACAAGGAGACC |
| | | GGCAAGGTGCTGCACCAGAAGACCCACTTCCCCCAGCCCTGGGAGT |
| | | TCTTCGCCCAGGAGGTGATGATCCGGGTGTTCGGCAAGCCCGACGG |
| | | CAAGCCCGAGTTCGAGGAGGCCGACACCCCCGAGAAGCTGCGGAC |
| | | CCTGCTGGCCGAGAAGCTGTCCTCCCGGCCCGAGGCCGTGCACGAG |
| | | TACGTGACCCCCCTGTTCGTGTCCCGGGCCCCCAACCGGAAGATGT |
| | | CCGGCGCCCACAAGGACACCCTGCGGTCCGCCAAGCGGTTCGTGAA |
| | | GCACAACGAGAAGATCTCCGTGAAGCGGGTGTGGCTGACCGAGAT |
| | | CAAGCTGGCCGACCTGGAGAACATGGTGAACTACAAGAACGGCCG |
| | | GGAGATCGAGCTGTACGAGGCCCTGAAGGCCCGGCTGGAGGCCTA |
| | | CGGCGGCAACGCCAAGCAGGCCTTCGACCCCAAGGACAACCCCTTC |
| | | TACAAGAAGGGCGGCCAGCTGGTGAAGGCCGTGCGGGTGGAGAAG |
| | | ACCCAGGAGTCCGGCGTGCTGCTGAACAAGAAGAACGCCTACACC |
| | | ATCGCCGACAACGGCGACATGGTGCGGGTGGACGTGTTCTGCAAGG |
| | | TGGACAAGAAGGGCAAGAACCAGTACTTCATCGTGCCCATCTACGC |
| | | CTGGCAGGTGGCCGAGAACATCCTGCCCGACATCGACTGCAAGGGC |
| | | TACCGGATCGACGACTCCTACACCTTCTGCTTCTCCCTGCACAAGTA |
| | | CGACCTGATCGCCTTCCAGAAGGACGAGAAGTCCAAGGTGGAGTTC |
| | | GCCTACTACATCAACTGCGACTCCTCCAACGGCCGGTTCTACCTGGC |
| | | CTGGCACGACAAGGGCTCCAAGGAGCAGCAGTTCCGGATCTCCACC |
| | | CAGAACCTGGTGCTGATCCAGAAGTACCAGGTGAACGAGCTGGGC |
| | | AAGGAGATCCGGCCCTGCCGGCTGAAGAAGCGGCCCCCCGTGCGG |
| 153 | open reading | ATGGCTGCTTTTAAGCCTAATCCTATTAATTATATTCTTGGTCTTGCT |
| | frame for D16A | ATTGGTATTGCTTCTGTTGGTTGGGCTATGGTTGAGATTGATGAGGA |
| | Nme2Cas9 | GGAGAATCCTATTCGTCTTATTGATCTTGGTGTTCGTGTTTTTGAGC |
| | nickase | GTGCTGAGGTTCCTAAGACTGGTGATTCTCTTGCTATGGCTCGTCGT |
| | | CTTGCTCGTTCTGTTCGTCGTCTTACTCGTCGTCGTGCTCATCGTCTT |
| | | CTTCGTGCTCGTCGTCTTCTTAAGCGTGAGGGTGTTCTTCAGGCTGC |
| | | TGATTTTGATGAGAATGGTCTTATTAAGTCTCTTCCTAATACTCCTT |
| | | GGCAGCTTCGTGCTGCTGCTCTTGATCGTAAGCTTACTCCTCTTGAG |
| | | TGGTCTGCTGTTCTTCTTCATCTTATTAAGCATCGTGGTTATCTTTCT |
| | | CAGCGTAAGAATGAGGGTGAGACTGCTGATAAGGAGCTTGGTGCTC |
| | | TTCTTAAGGGTGTTGCTAATAATGCTCATGCTCTTCAGACTGGTGAT |
| | | TTTCGTACTCCTGCTGAGCTTGCTCTTAATAAGTTTGAGAAGGAGTC |
| | | TGGTCATATTCGTAATCAGCGTGGTGATTATTCTCATACTTTTTCTC |
| | | GTAAGGATCTTCAGGCTGAGCTTATTCTTCTTTTTGAGAAGCAGAAG |
| | | GAGTTTGGTAATCCTCATGTTTCTGGTGGTCTTAAGGAGGGTATTGA |
| | | GACTCTTCTTATGACTCAGCGTCCTGCTCTTTCTGGTGATGCTGTTC |
| | | AGAAGATGCTTGGTCATTGTACTTTTGAGCCTGCTGAGCCTAAGGCT |
| | | GCTAAGAATACTTATACTGCTGAGCGTTTTATTTGGCTTACTAAGCT |
| | | TAATAATCTTCGTATTCTTGAGCAGGGTTCTGAGCGTCCTCTTACTG |
| | | ATACTGAGCGTGCTACTCTTATGGATGAGCCTTATCGTAAGTCTAAG |
| | | CTTACTTATGCTCAGGCTCGTAAGCTTCTTGGTCTTGAGGATACTGC |
| | | TTTTTTTAAGGGTCTTCGTTATGGTAAGGATAATGCTGAGGCTTCTA |
| | | CTCTTATGGAGATGAAGGCTTATCATGCTATTTCTCGTGCTCTTGAG |
| | | AAGGAGGGTCTTAAGGATAAGAAGTCTCCTCTTAATCTTTCTTCTGA |
| | | GCTTCAGGATGAGATTGGTACTGCTTTTTCTCTTTTTAAGACTGATG |
| | | AGGATATTACTGGTCGTCTTAAGGATCGTGTTCAGCCTGAGATTCTT |
| | | GAGGCTCTTCTTAAGCATATTTCTTTTGATAAGTTTGTTCAGATTTCT |
| | | CTTAAGGCTCTTCGTCGTATTGTTCCTCTTATGGAGCAGGGTAAGCG |
| | | TTATGATGAGGCTTGTGCTGAGATTTATGGTGATCATTATGGTAAGA |
| | | AGAATACTGAGGAGAAGATTTATCTTCCTCCTATTCCTGCTGATGAG |
| | | ATTCGTAATCCTGTTGTTCTTCGTGCTCTTTCTCAGGCTCGTAAGGTT |
| | | ATTAATGGTGTTGTTCGTCGTTATGGTTCTCCTGCTCGTATTCATATT |
| | | GAGACTGCTCGTGAGGTTGGTAAGTCTTTTAAGGATCGTAAGGAGA |
| | | TTGAGAAGCGTCAGGAGGAGAATCGTAAGGATCGTGAGAAGGCTG |
| | | CTGCTAAGTTTCGTGAGTATTTTCCTAATTTTGTTGGTGAGCCTAAG |
| | | TCTAAGGATATTCTTAAGCTTCGTCTTTATGAGCAGCAGCATGGTAA |
| | | GTGTCTTTATTCTGGTAAGGAGATTAATCTTGTTCGTCTTAATGAGA |
| | | AGGGTTATGTTGAGATTGATCATGCTCTTCCTTTTTCTCGTACTTGG |
| | | GATGATTCTTTTAATAATAAGGTTCTTGTTCTTGGTTCTGAGAATCA |
| | | GAATAAGGGTAATCAGACTCCTTATGAGTATTTTAATGGTAAGGAT |
| | | AATTCTCGTGAGTGGCAGGAGTTTAAGGCTCGTGTTGAGACTTCTC |
| | | GTTTTCCTCGTTCTAAGAAGCAGCGTATTCTTCTTCAGAAGTTTGAT |
| | | GAGGATGGTTTTAAGGAGTGTAATCTTAATGATACTCGTTATGTTAA |
| | | TCGTTTTCTTTGTCAGTTTGTTGCTGATCATATTCTTCTTACTGGTAA |
| | | GGGTAAGCGTCGTGTTTTTGCTTCTAATGGTCAGATTACTAATCTTC |
| | | TTCGTGGTTTTTGGGGTCTTCGTAAGGTTCGTGCTGAGAATGATCGT |
| | | CATCATGCTCTTGATGCTGTTGTTGTTGCTTGTTCTACTGTTGCTATG |
| | | CAGCAGAAGATTACTCGTTTTGTTCGTTATAAGGAGATGAATGCTTT |
| | | TGATGGTAAGACTATTGATAAGGAGACTGGTAAGGTTCTTCATCAG |
| | | AAGACTCATTTTCCTCAGCCTTGGGAGTTTTTTGCTCAGGAGGTTAT |
| | | GATTCGTGTTTTTGGTAAGCCTGATGGTAAGCCTGAGTTTGAGGAG |
| | | GCTGATACTCCTGAGAAGCTTCGTACTCTTCTTGCTGAGAAGCTTTC |
| | | TTCTCGTCCTGAGGCTGTTCATGAGTATGTTACTCCTCTTTTTGTTTC |
| | | TCGTGCTCCTAATCGTAAGATGTCTGGTGCTCATAAGGATACTCTTC |
| | | GTTCTGCTAAGCGTTTTGTTAAGCATAATGAGAAGATTTCTGTTAAG |
| | | CGTGTTTGGCTTACTGAGATTAAGCTTGCTGATCTTGAGAATATGGT |
| | | TAATTATAAGAATGGTCGTGAGATTGAGCTTTATGAGGCTCTTAAG |
| | | GCTCGTCTTGAGGCTTATGGTGGTAATGCTAAGCAGGCTTTTGATCC |
| | | TAAGGATAATCCTTTTTATAAGAAGGGTGGTCAGCTTGTTAAGGCT |
| | | GTTCGTGTTGAGAAGACTCAGGAGTCTGGTGTTCTTCTTAATAAGA |
| | | AGAATGCTTATACTATTGCTGATAATGGTGATATGGTTCGTGTTGAT |
| | | GTTTTTTGTAAGGTTGATAAGAAGGGTAAGAATCAGTATTTTATTGT |
| | | TCCTATTTATGCTTGGCAGGTTGCTGAGAATATTCTTCCTGATATTG |
| | | ATTGTAAGGGTTATCGTATTGATGATTCTTATACTTTTTGTTTTTCTC |
| | | TTCATAAGTATGATCTTATTGCTTTTCAGAAGGATGAGAAGTCTAAG |
| | | GTTGAGTTTGCTTATTATATTAATTGTGATTCTTCTAATGGTCGTTTT |
| | | TATCTTGCTTGGCATGATAAGGGTTCTAAGGAGCAGCAGTTTCGTAT |
| | | TTCTACTCAGAATCTTGTTCTTATTCAGAAGTATCAGGTTAATGAGC |
| | | TTGGTAAGGAGATTCGTCCTTGTCGTCTTAAGAAGCGTCCTCCTGTT |
| | | CGTUGA |
| 154 | open reading | ATGGCCGCCTTCAAGCCCAACCCCATCAACTACATCCTGGGCCTGG |
| | frame for D16A | CCATCGGCATCGCCTCCGTGGGCTGGGCCATGGTGGAGATCGACGA |
| | Nme2Cas9 | GGAGGAGAACCCCATCCGGCTGATCGACCTGGGCGTGCGGGTGTTC |
| | nickase | GAGCGGGCCGAGGTGCCCAAGACCGGCGACTCCCTGGCCATGGCCC |
| | | GGCGGCTGGCCCGGTCCGTGCGGCGGCTGACCCGGCGGCGGGCCCA |
| | | CCGGCTGCTGCGGGCCCGGCGGCTGCTGAAGCGGGAGGGCGTGCTG |
| | | CAGGCCGCCGACTTCGACGAGAACGGCCTGATCAAGTCCCTGCCCA |
| | | ACACCCCCTGGCAGCTGCGGGCCGCCGCCCTGGACCGGAAGCTGAC |
| | | CCCCCTGGAGTGGTCCGCCGTGCTGCTGCACCTGATCAAGCACCGG |
| | | GGCTACCTGTCCCAGCGGAAGAACGAGGGCGAGACCGCCGACAAG |
| | | GAGCTGGGCGCCCTGCTGAAGGGCGTGGCCAACAACGCCCACGCCC |
| | | TGCAGACCGGCGACTTCCGGACCCCCGCCGAGCTGGCCCTGAACAA |
| | | GTTCGAGAAGGAGTCCGGCCACATCCGGAACCAGCGGGGCGACTA |
| | | CTCCCACACCTTCTCCCGGAAGGACCTGCAGGCCGAGCTGATCCTG |
| | | CTGTTCGAGAAGCAGAAGGAGTTCGGCAACCCCCACGTGTCCGGCG |
| | | GCCTGAAGGAGGGCATCGAGACCCTGCTGATGACCCAGCGGCCCGC |
| | | CCTGTCCGGCGACGCCGTGCAGAAGATGCTGGGCCACTGCACCTTC |
| | | GAGCCCGCCGAGCCCAAGGCCGCCAAGAACACCTACACCGCCGAG |
| | | CGGTTCATCTGGCTGACCAAGCTGAACAACCTGCGGATCCTGGAGC |
| | | AGGGCTCCGAGCGGCCCCTGACCGACACCGAGCGGGCCACCCTGAT |
| | | GGACGAGCCCTACCGGAAGTCCAAGCTGACCTACGCCCAGGCCCGG |
| | | AAGCTGCTGGGCCTGGAGGACACCGCCTTCTTCAAGGGCCTGCGGT |
| | | ACGGCAAGGACAACGCCGAGGCCTCCACCCTGATGGAGATGAAGG |
| | | CCTACCACGCCATCTCCCGGGCCCTGGAGAAGGAGGGCCTGAAGGA |
| | | CAAGAAGTCCCCCCTGAACCTGTCCTCCGAGCTGCAGGACGAGATC |
| | | GGCACCGCCTTCTCCCTGTTCAAGACCGACGAGGACATCACCGGCC |
| | | GGCTGAAGGACCGGGTGCAGCCCGAGATCCTGGAGGCCCTGCTGA |
| | | AGCACATCTCCTTCGACAAGTTCGTGCAGATCTCCCTGAAGGCCCT |
| | | GCGGCGGATCGTGCCCCTGATGGAGCAGGGCAAGCGGTACGACGA |
| | | GGCCTGCGCCGAGATCTACGGCGACCACTACGGCAAGAAGAACAC |
| | | CGAGGAGAAGATCTACCTGCCCCCCATCCCCGCCGACGAGATCCGG |
| | | AACCCCGTGGTGCTGCGGGCCCTGTCCCAGGCCCGGAAGGTGATCA |
| | | ACGGCGTGGTGCGGCGGTACGGCTCCCCCGCCCGGATCCACATCGA |
| | | GACCGCCCGGGAGGTGGGCAAGTCCTTCAAGGACCGGAAGGAGAT |
| | | CGAGAAGCGGCAGGAGGAGAACCGGAAGGACCGGGAGAAGGCCG |
| | | CCGCCAAGTTCCGGGAGTACTTCCCCAACTTCGTGGGCGAGCCCAA |
| | | GTCCAAGGACATCCTGAAGCTGCGGCTGTACGAGCAGCAGCACGGC |
| | | AAGTGCCTGTACTCCGGCAAGGAGATCAACCTGGTGCGGCTGAACG |
| | | AGAAGGGCTACGTGGAGATCGACCACGCCCTGCCCTTCTCCCGGAC |
| | | CTGGGACGACTCCTTCAACAACAAGGTGCTGGTGCTGGGCTCCGAG |
| | | AACCAGAACAAGGGCAACCAGACCCCCTACGAGTACTTCAACGGC |
| | | AAGGACAACTCCCGGGAGTGGCAGGAGTTCAAGGCCCGGGTGGAG |
| | | ACCTCCCGGTTCCCCCGGTCCAAGAAGCAGCGGATCCTGCTGCAGA |
| | | AGTTCGACGAGGACGGCTTCAAGGAGTGCAACCTGAACGACACCC |
| | | GGTACGTGAACCGGTTCCTGTGCCAGTTCGTGGCCGACCACATCCT |
| | | GCTGACCGGCAAGGGCAAGCGGCGGGTGTTCGCCTCCAACGGCCA |
| | | GATCACCAACCTGCTGCGGGGCTTCTGGGGCCTGCGGAAGGTGCGG |
| | | GCCGAGAACGACCGGCACCACGCCCTGGACGCCGTGGTGGTGGCCT |
| | | GCTCCACCGTGGCCATGCAGCAGAAGATCACCCGGTTCGTGCGGTA |
| | | CAAGGAGATGAACGCCTTCGACGGCAAGACCATCGACAAGGAGAC |
| | | CGGCAAGGTGCTGCACCAGAAGACCCACTTCCCCCAGCCCTGGGAG |
| | | TTCTTCGCCCAGGAGGTGATGATCCGGGTGTTCGGCAAGCCCGACG |
| | | GCAAGCCCGAGTTCGAGGAGGCCGACACCCCCGAGAAGCTGCGGA |
| | | CCCTGCTGGCCGAGAAGCTGTCCTCCCGGCCCGAGGCCGTGCACGA |
| | | GTACGTGACCCCCCTGTTCGTGTCCCGGGCCCCCAACCGGAAGATG |
| | | TCCGGCGCCCACAAGGACACCCTGCGGTCCGCCAAGCGGTTCGTGA |
| | | AGCACAACGAGAAGATCTCCGTGAAGCGGGTGTGGCTGACCGAGA |
| | | TCAAGCTGGCCGACCTGGAGAACATGGTGAACTACAAGAACGGCC |
| | | GGGAGATCGAGCTGTACGAGGCCCTGAAGGCCCGGCTGGAGGCCT |
| | | ACGGCGGCAACGCCAAGCAGGCCTTCGACCCCAAGGACAACCCCTT |
| | | CTACAAGAAGGGCGGCCAGCTGGTGAAGGCCGTGCGGGTGGAGAA |
| | | GACCCAGGAGTCCGGCGTGCTGCTGAACAAGAAGAACGCCTACAC |
| | | CATCGCCGACAACGGCGACATGGTGCGGGTGGACGTGTTCTGCAAG |
| | | GTGGACAAGAAGGGCAAGAACCAGTACTTCATCGTGCCCATCTACG |
| | | CCTGGCAGGTGGCCGAGAACATCCTGCCCGACATCGACTGCAAGGG |
| | | CTACCGGATCGACGACTCCTACACCTTCTGCTTCTCCCTGCACAAGT |
| | | ACGACCTGATCGCCTTCCAGAAGGACGAGAAGTCCAAGGTGGAGTT |
| | | CGCCTACTACATCAACTGCGACTCCTCCAACGGCCGGTTCTACCTGG |
| | | CCTGGCACGACAAGGGCTCCAAGGAGCAGCAGTTCCGGATCTCCAC |
| | | CCAGAACCTGGTGCTGATCCAGAAGTACCAGGTGAACGAGCTGGGC |
| | | AAGGAGATCCGGCCCTGCCGGCTGAAGAAGCGGCCCCCCGTGCGG |
| | | UGA |
| 155 | open reading | ATGGCCGCCTTCAAGCCCAACCCCATCAACTACATCCTGGGCCTGG |
| | frame for D16A | CCATCGGCATCGCCTCCGTGGGCTGGGCCATGGTGGAGATCGACGA |
| | Nme2Cas9 | GGAGGAGAACCCCATCCGGCTGATCGACCTGGGCGTGCGGGTGTTC |
| | nickase | GAGCGGGCCGAGGTGCCCAAGACCGGCGACTCCCTGGCCATGGCCC |
| | | GGCGGCTGGCCCGGTCCGTGCGGCGGCTGACCCGGCGGCGGGCCCA |
| | | CCGGCTGCTGCGGGCCCGGCGGCTGCTGAAGCGGGAGGGCGTGCTG |
| | | CAGGCCGCCGACTTCGACGAGAACGGCCTGATCAAGTCCCTGCCCA |
| | | ACACCCCCTGGCAGCTGCGGGCCGCCGCCCTGGACCGGAAGCTGAC |
| | | CCCCCTGGAGTGGTCCGCCGTGCTGCTGCACCTGATCAAGCACCGG |
| | | GGCTACCTGTCCCAGCGGAAGAACGAGGGCGAGACCGCCGACAAG |
| | | GAGCTGGGCGCCCTGCTGAAGGGCGTGGCCAACAACGCCCACGCCC |
| | | TGCAGACCGGCGACTTCCGGACCCCCGCCGAGCTGGCCCTGAACAA |
| | | GTTCGAGAAGGAGTCCGGCCACATCCGGAACCAGCGGGGCGACTA |
| | | CTCCCACACCTTCTCCCGGAAGGACCTGCAGGCCGAGCTGATCCTG |
| | | CTGTTCGAGAAGCAGAAGGAGTTCGGCAACCCCCACGTGTCCGGCG |
| | | GCCTGAAGGAGGGCATCGAGACCCTGCTGATGACCCAGCGGCCCGC |
| | | CCTGTCCGGCGACGCCGTGCAGAAGATGCTGGGCCACTGCACCTTC |
| | | GAGCCCGCCGAGCCCAAGGCCGCCAAGAACACCTACACCGCCGAG |
| | | CGGTTCATCTGGCTGACCAAGCTGAACAACCTGCGGATCCTGGAGC |
| | | AGGGCTCCGAGCGGCCCCTGACCGACACCGAGCGGGCCACCCTGAT |
| | | GGACGAGCCCTACCGGAAGTCCAAGCTGACCTACGCCCAGGCCCGG |
| | | AAGCTGCTGGGCCTGGAGGACACCGCCTTCTTCAAGGGCCTGCGGT |
| | | ACGGCAAGGACAACGCCGAGGCCTCCACCCTGATGGAGATGAAGG |
| | | CCTACCACGCCATCTCCCGGGCCCTGGAGAAGGAGGGCCTGAAGGA |
| | | CAAGAAGTCCCCCCTGAACCTGTCCTCCGAGCTGCAGGACGAGATC |
| | | GGCACCGCCTTCTCCCTGTTCAAGACCGACGAGGACATCACCGGCC |
| | | GGCTGAAGGACCGGGTGCAGCCCGAGATCCTGGAGGCCCTGCTGA |
| | | AGCACATCTCCTTCGACAAGTTCGTGCAGATCTCCCTGAAGGCCCT |
| | | GCGGCGGATCGTGCCCCTGATGGAGCAGGGCAAGCGGTACGACGA |
| | | GGCCTGCGCCGAGATCTACGGCGACCACTACGGCAAGAAGAACAC |
| | | CGAGGAGAAGATCTACCTGCCCCCCATCCCCGCCGACGAGATCCGG |
| | | AACCCCGTGGTGCTGCGGGCCCTGTCCCAGGCCCGGAAGGTGATCA |
| | | ACGGCGTGGTGCGGCGGTACGGCTCCCCCGCCCGGATCCACATCGA |
| | | GACCGCCCGGGAGGTGGGCAAGTCCTTCAAGGACCGGAAGGAGAT |
| | | CGAGAAGCGGCAGGAGGAGAACCGGAAGGACCGGGAGAAGGCCG |
| | | CCGCCAAGTTCCGGGAGTACTTCCCCAACTTCGTGGGCGAGCCCAA |
| | | GTCCAAGGACATCCTGAAGCTGCGGCTGTACGAGCAGCAGCACGGC |
| | | AAGTGCCTGTACTCCGGCAAGGAGATCAACCTGGTGCGGCTGAACG |
| | | AGAAGGGCTACGTGGAGATCGACCACGCCCTGCCCTTCTCCCGGAC |
| | | CTGGGACGACTCCTTCAACAACAAGGTGCTGGTGCTGGGCTCCGAG |
| | | AACCAGAACAAGGGCAACCAGACCCCCTACGAGTACTTCAACGGC |
| | | AAGGACAACTCCCGGGAGTGGCAGGAGTTCAAGGCCCGGGTGGAG |
| | | ACCTCCCGGTTCCCCCGGTCCAAGAAGCAGCGGATCCTGCTGCAGA |
| | | AGTTCGACGAGGACGGCTTCAAGGAGTGCAACCTGAACGACACCC |
| | | GGTACGTGAACCGGTTCCTGTGCCAGTTCGTGGCCGACCACATCCT |
| | | GCTGACCGGCAAGGGCAAGCGGCGGGTGTTCGCCTCCAACGGCCA |
| | | GATCACCAACCTGCTGCGGGGCTTCTGGGGCCTGCGGAAGGTGCGG |
| | | GCCGAGAACGACCGGCACCACGCCCTGGACGCCGTGGTGGTGGCCT |
| | | GCTCCACCGTGGCCATGCAGCAGAAGATCACCCGGTTCGTGCGGTA |
| | | CAAGGAGATGAACGCCTTCGACGGCAAGACCATCGACAAGGAGAC |
| | | CGGCAAGGTGCTGCACCAGAAGACCCACTTCCCCCAGCCCTGGGAG |
| | | TTCTTCGCCCAGGAGGTGATGATCCGGGTGTTCGGCAAGCCCGACG |
| | | GCAAGCCCGAGTTCGAGGAGGCCGACACCCCCGAGAAGCTGCGGA |
| | | CCCTGCTGGCCGAGAAGCTGTCCTCCCGGCCCGAGGCCGTGCACGA |
| | | GTACGTGACCCCCCTGTTCGTGTCCCGGGCCCCCAACCGGAAGATG |
| | | TCCGGCGCCCACAAGGACACCCTGCGGTCCGCCAAGCGGTTCGTGA |
| | | AGCACAACGAGAAGATCTCCGTGAAGCGGGTGTGGCTGACCGAGA |
| | | TCAAGCTGGCCGACCTGGAGAACATGGTGAACTACAAGAACGGCC |
| | | GGGAGATCGAGCTGTACGAGGCCCTGAAGGCCCGGCTGGAGGCCT |
| | | ACGGCGGCAACGCCAAGCAGGCCTTCGACCCCAAGGACAACCCCTT |
| | | CTACAAGAAGGGCGGCCAGCTGGTGAAGGCCGTGCGGGTGGAGAA |
| | | GACCCAGGAGTCCGGCGTGCTGCTGAACAAGAAGAACGCCTACAC |
| | | CATCGCCGACAACGGCGACATGGTGCGGGTGGACGTGTTCTGCAAG |
| | | GTGGACAAGAAGGGCAAGAACCAGTACTTCATCGTGCCCATCTACG |
| | | CCTGGCAGGTGGCCGAGAACATCCTGCCCGACATCGACTGCAAGGG |
| | | CTACCGGATCGACGACTCCTACACCTTCTGCTTCTCCCTGCACAAGT |
| | | ACGACCTGATCGCCTTCCAGAAGGACGAGAAGTCCAAGGTGGAGTT |
| | | CGCCTACTACATCAACTGCGACTCCTCCAACGGCCGGTTCTACCTGG |
| | | CCTGGCACGACAAGGGCTCCAAGGAGCAGCAGTTCCGGATCTCCAC |
| | | CCAGAACCTGGTGCTGATCCAGAAGTACCAGGTGAACGAGCTGGGC |
| | | AAGGAGATCCGGCCCTGCCGGCTGAAGAAGCGGCCCCCCGTGCGG |
| | | UAA |
| 156 | Cas9 amino acid | MDKKYSIGLDIGTNSVGWAVITDEYKVPSKKFKVLGNTDRHSIKKNLI |
| | sequence | GALLFDSGETAEATRLKRTARRRYTRRKNRICYLQEIFSNEMAKVDDS |
| | | FFHRLEESFLVEEDKKHERHPIFGNIVDEVAYHEKYPTIYHLRKKLVDS |
| | | TDKADLRLIYLALAHMIKFRGHFLIEGDLNPDNSDVDKLFIQLVQTYN |
| | | QLFEENPINASGVDAKAILSARLSKSRRLENLIAQLPGEKKNGLFGNLIA |
| | | LSLGLTPNFKSNFDLAEDAKLQLSKDTYDDDLDNLLAQIGDQYADLFL |
| | | AAKNLSDAILLSDILRVNTEITKAPLSASMIKRYDEHHQDLTLLKALVR |
| | | QQLPEKYKEIFFDQSKNGYAGYIDGGASQEEFYKFIKPILEKMDGTEEL |
| | | LVKLNREDLLRKQRTFDNGSIPHQIHLGELHAILRRQEDFYPFLKDNRE |
| | | KIEKILTFRIPYYVGPLARGNSRFAWMTRKSEETITPWNFEEVVDKGAS |
| | | AQSFIERMTNFDKNLPNEKVLPKHSLLYEYFTVYNELTKVKYVTEGMR |
| | | KPAFLSGEQKKAIVDLLFKTNRKVTVKQLKEDYFKKIECFDSVEISGVE |
| | | DRFNASLGTYHDLLKIIKDKDFLDNEENEDILEDIVLTLTLFEDREMIEE |
| | | RLKTYAHLFDDKVMKQLKRRRYTGWGRLSRKLINGIRDKQSGKTILD |
| | | FLKSDGFANRNFMQLIHDDSLTFKEDIQKAQVSGQGDSLHEHIANLAG |
| | | SPAIKKGILQTVKVVDELVKVMGRHKPENIVIEMARENQTTQKGQKNS |
| | | RERMKRIEEGIKELGSQILKEHPVENTQLQNEKLYLYYLQNGRDMYVD |
| | | QELDINRLSDYDVDHIVPQSFLKDDSIDNKVLTRSDKNRGKSDNVPSEE |
| | | VVKKMKNYWRQLLNAKLITQRKFDNLTKAERGGLSELDKAGFIKRQL |
| | | VETRQITKHVAQILDSRMNTKYDENDKLIREVKVITLKSKLVSDFRKDF |
| | | QFYKVREINNYHHAHDAYLNAVVGTALIKKYPKLESEFVYGDYKVYD |
| | | VRKMIAKSEQEIGKATAKYFFYSNIMNFFKTEITLANGEIRKRPLIETNG |
| | | ETGEIVWDKGRDFATVRKVLSMPQVNIVKKTEVQTGGFSKESILPKRN |
| | | SDKLIARKKDWDPKKYGGFDSPTVAYSVLVVAKVEKGKSKKLKSVKE |
| | | LLGITIMERSSFEKNPIDFLEAKGYKEVKKDLIIKLPKYSLFELENGRKR |
| | | MLASAGELQKGNELALPSKYVNFLYLASHYEKLKGSPEDNEQKQLFV |
| | | EQHKHYLDEIIEQISEFSKRVILADANLDKVLSAYNKHRDKPIREQAENI |
| | | IHLFTLTNLGAPAAFKYFDTTIDRKRYTSTKEVLDATLIHQSITGLYETR |
| | | IDLSQLGGDGGGSPKKKRKV |
| 157 | Amino acid | MTGAAFKPNPINYILGLDIGIASVGWAMVEIDEEENPIRLIDLGVRVFER |
| | sequence for | AEVPKTGDSLAMARRLARSVRRLTRRRAHRLLRARRLLKREGVLQAA |
| | Nme2Cas9 | DFDENGLIKSLPNTPWQLRAAALDRKLTPLEWSAVLLHLIKHRGYLSQ |
| | encoded by | RKNEGETADKELGALLKGVANNAHALQTGDFRTPAELALNKFEKESG |
| | mRNA C | HIRNQRGDYSHTFSRKDLQAELILLFEKQKEFGNPHVSGGLKEGIETLL |
| | | MTQRPALSGDAVQKMLGHCTFEPAEPKAAKNTYTAERFIWLTKLNNL |
| | | RILEQGSERPLTDTERATLMDEPYRKSKLTYAQARKLLGLEDTAFFKG |
| | | LRYGKDNAEASTLMEMKAYHAISRALEKEGLKDKKSPLNLSSELQDEI |
| | | GTAFSLFKTDEDITGRLKDRVQPEILEALLKHISFDKFVQISLKALRRIVP |
| | | LMEQGKRYDEACAEIYGDHYGKKNTEEKIYLPPIPADEIRNPVVLRALS |
| | | QARKVINGVVRRYGSPARIHIETAREVGKSFKDRKEIEKRQEENRKDRE |
| | | KAAAKFREYFPNFVGEPKSKDILKLRLYEQQHGKCLYSGKEINLVRLN |
| | | EKGYVEIDHALPFSRTWDDSFNNKVLVLGSENQNKGNQTPYEYFNGK |
| | | DNSREWQEFKARVETSRFPRSKKQRILLQKFDEDGFKECNLNDTRYVN |
| | | RFLCQFVADHILLTGKGKRRVFASNGQITNLLRGFWGLRKVRAENDR |
| | | HHALDAVVVACSTVAMQQKITRFVRYKEMNAFDGKTIDKETGKVLH |
| | | QKTHFPQPWEFFAQEVMIRVFGKPDGKPEFEEADTPEKLRTLLAEKLSS |
| | | RPEAVHEYVTPLFVSRAPNRKMSGAHKDTLRSAKRFVKHNEKISVKR |
| | | VWLTEIKLADLENMVNYKNGREIELYEALKARLEAYGGNAKQAFDPK |
| | | DNPFYKKGGQLVKAVRVEKTQESGVLLNKKNAYTIADNGDMVRVDV |
| | | FCKVDKKGKNQYFIVPIYAWQVAENILPDIDCKGYRIDDSYTFCFSLHK |
| | | YDLIAFQKDEKSKVEFAYYINCDSSNGRFYLAWHDKGSKEQQFRISTQ |
| | | NLVLIQKYQVNELGKEIRPCRLKKRPPVRSGKRTADGSEFESPKKKRK |
| | | VE |
| 158 | Amino acid | MAAFKPNPINYILGLDIGIASVGWAMVEIDEEENPIRLIDLGVRVFERAE |
| | sequence for | VPKTGDSLAMARRLARSVRRLTRRRAHRLLRARRLLKREGVLQAADF |
| | Nme2Cas9 | DENGLIKSLPNTPWQLRAAALDRKLTPLEWSAVLLHLIKHRGYLSQRK |
| | encoded by | NEGETADKELGALLKGVANNAHALQTGDFRTPAELALNKFEKESGHI |
| | mRNA H | RNQRGDYSHTFSRKDLQAELILLFEKQKEFGNPHVSGGLKEGIETLLMT |
| | | QRPALSGDAVQKMLGHCTFEPAEPKAAKNTYTAERFIWLTKLNNLRIL |
| | | EQGSERPLTDTERATLMDEPYRKSKLTYAQARKLLGLEDTAFFKGLRY |
| | | GKDNAEASTLMEMKAYHAISRALEKEGLKDKKSPLNLSSELQDEIGTA |
| | | FSLFKTDEDITGRLKDRVQPEILEALLKHISFDKFVQISLKALRRIVPLME |
| | | QGKRYDEACAEIYGDHYGKKNTEEKIYLPPIPADEIRNPVVLRALSQAR |
| | | KVINGVVRRYGSPARIHIETAREVGKSFKDRKEIEKRQEENRKDREKA |
| | | AAKFREYFPNFVGEPKSKDILKLRLYEQQHGKCLYSGKEINLVRLNEK |
| | | GYVEIDHALPFSRTWDDSFNNKVLVLGSENQNKGNQTPYEYFNGKDN |
| | | SREWQEFKARVETSRFPRSKKQRILLQKFDEDGFKECNLNDTRYVNRF |
| | | LCQFVADHILLTGKGKRRVFASNGQITNLLRGFWGLRKVRAENDRHH |
| | | ALDAVVVACSTVAMQQKITRFVRYKEMNAFDGKTIDKETGKVLHQK |
| | | THFPQPWEFFAQEVMIRVFGKPDGKPEFEEADTPEKLRTLLAEKLSSRP |
| | | EAVHEYVTPLFVSRAPNRKMSGAHKDTLRSAKRFVKHNEKISVKRVW |
| | | LTEIKLADLENMVNYKNGREIELYEALKARLEAYGGNAKQAFDPKDN |
| | | PFYKKGGQLVKAVRVEKTQESGVLLNKKNAYTIADNGDMVRVDVFC |
| | | KVDKSGGGSPKKKRKVSGGSGKNQYFIVPIYAWQVAENILPDIDCKGY |
| | | RIDDSYTFCFSLHKYDLIAFQKDEKSKVEFAYYINCDSSNGRFYLAWH |
| | | DKGSKEQQFRISTQNLVLIQKYQVNELGKEIRPCRLKKRPPVR |
| 159 | Amino acid | MVPKKKRKVAAFKPNPINYILGLDIGIASVGWAMVEIDEEENPIRLIDL |
| | sequence for | GVRVFERAEVPKTGDSLAMARRLARSVRRLTRRRAHRLLRARRLLKR |
| | Nme2Cas9 | EGVLQAADFDENGLIKSLPNTPWQLRAAALDRKLTPLEWSAVLLHLIK |
| | encoded by | HRGYLSQRKNEGETADKELGALLKGVANNAHALQTGDFRTPAELALN |
| | mRNA I | KFEKESGHIRNQRGDYSHTFSRKDLQAELILLFEKQKEFGNPHVSGGLK |
| | | EGIETLLMTQRPALSGDAVQKMLGHCTFEPAEPKAAKNTYTAERFIWL |
| | | TKLNNLRILEQGSERPLTDTERATLMDEPYRKSKLTYAQARKLLGLED |
| | | TAFFKGLRYGKDNAEASTLMEMKAYHAISRALEKEGLKDKKSPLNLS |
| | | SELQDEIGTAFSLFKTDEDITGRLKDRVQPEILEALLKHISFDKFVQISLK |
| | | ALRRIVPLMEQGKRYDEACAEIYGDHYGKKNTEEKIYLPPIPADEIRNP |
| | | VVLRALSQARKVINGVVRRYGSPARIHIETAREVGKSFKDRKEIEKRQE |
| | | ENRKDREKAAAKFREYFPNFVGEPKSKDILKLRLYEQQHGKCLYSGKE |
| | | INLVRLNEKGYVEIDHALPFSRTWDDSFNNKVLVLGSENQNKGNQTPY |
| | | EYFNGKDNSREWQEFKARVETSRFPRSKKQRILLQKFDEDGFKECNLN |
| | | DTRYVNRFLCQFVADHILLTGKGKRRVFASNGQITNLLRGFWGLRKV |
| | | RAENDRHHALDAVVVACSTVAMQQKITRFVRYKEMNAFDGKTIDKE |
| | | TGKVLHQKTHFPQPWEFFAQEVMIRVFGKPDGKPEFEEADTPEKLRTL |
| | | LAEKLSSRPEAVHEYVTPLFVSRAPNRKMSGAHKDTLRSAKRFVKHNE |
| | | KISVKRVWLTEIKLADLENMVNYKNGREIELYEALKARLEAYGGNAK |
| | | QAFDPKDNPFYKKGGQLVKAVRVEKTQESGVLLNKKNAYTIADNGD |
| | | MVRVDVFCKVDKKGKNQYFIVPIYAWQVAENILPDIDCKGYRIDDSYT |
| | | FCFSLHKYDLIAFQKDEKSKVEFAYYINCDSSNGRFYLAWHDKGSKEQ |
| | | QFRISTQNLVLIQKYQVNELGKEIRPCRLKKRPPVRYPYDVPDYAAAPA |
| | | AKKKKLD |
| 160 | Amino acid | MAAFKPNPINYILGLDIGIASVGWAMVEIDEEENPIRLIDLGVRVFERAE |
| | sequence for | VPKTGDSLAMARRLARSVRRLTRRRAHRLLRARRLLKREGVLQAADF |
| | Nme2Cas9 | DENGLIKSLPNTPWQLRAAALDRKLTPLEWSAVLLHLIKHRGYLSQRK |
| | encoded by | NEGETADKELGALLKGVANNAHALQTGDFRTPAELALNKFEKESGHI |
| | mRNA J | RNQRGDYSHTFSRKDLQAELILLFEKQKEFGNPHVSGGLKEGIETLLMT |
| | | QRPALSGDAVQKMLGHCTFEPAEPKAAKNTYTAERFIWLTKLNNLRIL |
| | | EQGSERPLTDTERATLMDEPYRKSKLTYAQARKLLGLEDTAFFKGLRY |
| | | GKDNAEASTLMEMKAYHAISRALEKEGLKDKKSPLNLSSELQDEIGTA |
| | | FSLFKTDEDITGRLKDRVQPEILEALLKHISFDKFVQISLKALRRIVPLME |
| | | QGKRYDEACAEIYGDHYGKKNTEEKIYLPPIPADEIRNPVVLRALSQAR |
| | | KVINGVVRRYGSPARIHIETAREVGKSFKDRKEIEKRQEENRKDREKA |
| | | AAKFREYFPNFVGEPKSKDILKLRLYEQQHGKCLYSGKEINLVRLNEK |
| | | GYVEIDHALPFSRTWDDSFNNKVLVLGSENQNKGNQTPYEYFNGKDN |
| | | SREWQEFKARVETSRFPRSKKQRILLQKFDEDGFKECNLNDTRYVNRF |
| | | LCQFVADHILLTGKGKRRVFASNGQITNLLRGFWGLRKVRAENDRHH |
| | | ALDAVVVACSTVAMQQKITRFVRYKEMNAFDGKTIDKETGKVLHQK |
| | | THFPQPWEFFAQEVMIRVFGKPDGKPEFEEADTPEKLRTLLAEKLSSRP |
| | | EAVHEYVTPLFVSRAPNRKMSGAHKDTLRSAKRFVKHNEKISVKRVW |
| | | LTEIKLADLENMVNYKNGREIELYEALKARLEAYGGNAKQAFDPKDN |
| | | PFYKKGGQLVKAVRVEKTQESGVLLNKKNAYTIADNGDMVRVDVFC |
| | | KVDKKGKNQYFIVPIYAWQVAENILPDIDCKGYRIDDSYTFCFSLHKY |
| | | DLIAFQKDEKSKVEFAYYINCDSSNGRFYLAWHDKGSKEQQFRISTQN |
| | | LVLIQKYQVNELGKEIRPCRLKKRPPVR |
| 161 | Amino acid | MAAFKPNPINYILGLDIGIASVGWAMVEIDEEENPIRLIDLGVRVFERAE |
| | sequence for | VPKTGDSLAMARRLARSVRRLTRRRAHRLLRARRLLKREGVLQAADF |
| | Nme2Cas9 | DENGLIKSLPNTPWQLRAAALDRKLTPLEWSAVLLHLIKHRGYLSQRK |
| | encoded by | NEGETADKELGALLKGVANNAHALQTGDFRTPAELALNKFEKESGHI |
| | mRNA K | RNQRGDYSHTFSRKDLQAELILLFEKQKEFGNPHVSGGLKEGIETLLMT |
| | | QRPALSGDAVQKMLGHCTFEPAEPKAAKNTYTAERFIWLTKLNNLRIL |
| | | EQGSERPLTDTERATLMDEPYRKSKLTYAQARKLLGLEDTAFFKGLRY |
| | | GKDNAEASTLMEMKAYHAISRALEKEGLKDKKSPLNLSSELQDEIGTA |
| | | FSLFKTDEDITGRLKDRVQPEILEALLKHISFDKFVQISLKALRRIVPLME |
| | | QGKRYDEACAEIYGDHYGKKNTEEKIYLPPIPADEIRNPVVLRALSQAR |
| | | KVINGVVRRYGSPARIHIETAREVGKSFKDRKEIEKRQEENRKDREKA |
| | | AAKFREYFPNFVGEPKSKDILKLRLYEQQHGKCLYSGKEINLVRLNEK |
| | | GYVEIDHALPFSRTWDDSFNNKVLVLGSENQNKGNQTPYEYFNGKDN |
| | | SREWQEFKARVETSRFPRSKKQRILLQKFDEDGFKECNLNDTRYVNRF |
| | | LCQFVADHILLTGKGKRRVFASNGQITNLLRGFWGLRKVRAENDRHH |
| | | ALDAVVVACSTVAMQQKITRFVRYKEMNAFDGKTIDKETGKVLHQK |
| | | THFPQPWEFFAQEVMIRVFGKPDGKPEFEEADTPEKLRTLLAEKLSSRP |
| | | EAVHEYVTPLFVSRAPNRKMSGAHKDTLRSAKRFVKHNEKISVKRVW |
| | | LTEIKLADLENMVNYKNGREIELYEALKARLEAYGGNAKQAFDPKDN |
| | | PFYKKGGQLVKAVRVEKTQESGVLLNKKNAYTIADNGDMVRVDVFC |
| | | KVDKKGKNQYFIVPIYAWQVAENILPDIDCKGYRIDDSYTFCFSLHKY |
| | | DLIAFQKDEKSKVEFAYYINCDSSNGRFYLAWHDKGSKEQQFRISTQN |
| | | LVLIQKYQVNELGKEIRPCRLKKRPPVR |
| 162 | Amino acid | MDGSGGGSPKKKRKVGGSGGGAAFKPNPINYILGLDIGIASVGWAMV |
| | sequence for | EIDEEENPIRLIDLGVRVFERAEVPKTGDSLAMARRLARSVRRLTRRRA |
| | Nme2Cas9 | HRLLRARRLLKREGVLQAADFDENGLIKSLPNTPWQLRAAALDRKLTP |
| | encoded by | LEWSAVLLHLIKHRGYLSQRKNEGETADKELGALLKGVANNAHALQT |
| | mRNA L | GDFRTPAELALNKFEKESGHIRNQRGDYSHTFSRKDLQAELILLFEKQK |
| | | EFGNPHVSGGLKEGIETLLMTQRPALSGDAVQKMLGHCTFEPAEPKAA |
| | | KNTYTAERFIWLTKLNNLRILEQGSERPLTDTERATLMDEPYRKSKLTY |
| | | AQARKLLGLEDTAFFKGLRYGKDNAEASTLMEMKAYHAISRALEKEG |
| | | LKDKKSPLNLSSELQDEIGTAFSLFKTDEDITGRLKDRVQPEILEALLKH |
| | | ISFDKFVQISLKALRRIVPLMEQGKRYDEACAEIYGDHYGKKNTEEKIY |
| | | LPPIPADEIRNPVVLRALSQARKVINGVVRRYGSPARIHIETAREVGKSF |
| | | KDRKEIEKRQEENRKDREKAAAKFREYFPNFVGEPKSKDILKLRLYEQ |
| | | QHGKCLYSGKEINLVRLNEKGYVEIDHALPFSRTWDDSFNNKVLVLGS |
| | | ENQNKGNQTPYEYFNGKDNSREWQEFKARVETSRFPRSKKQRILLQKF |
| | | DEDGFKECNLNDTRYVNRFLCQFVADHILLTGKGKRRVFASNGQITNL |
| | | LRGFWGLRKVRAENDRHHALDAVVVACSTVAMQQKITRFVRYKEMN |
| | | AFDGKTIDKETGKVLHQKTHFPQPWEFFAQEVMIRVFGKPDGKPEFEE |
| | | ADTPEKLRTLLAEKLSSRPEAVHEYVTPLFVSRAPNRKMSGAHKDTLR |
| | | SAKRFVKHNEKISVKRVWLTEIKLADLENMVNYKNGREIELYEALKA |
| | | RLEAYGGNAKQAFDPKDNPFYKKGGQLVKAVRVEKTQESGVLLNKK |
| | | NAYTIADNGDMVRVDVFCKVDKKGKNQYFIVPIYAWQVAENILPDID |
| | | CKGYRIDDSYTFCFSLHKYDLIAFQKDEKSKVEFAYYINCDSSNGRFYL |
| | | AWHDKGSKEQQFRISTQNLVLIQKYQVNELGKEIRPCRLKKRPPVR |
| 163 | Amino acid | MDGSGGGSPKKKRKVGGSGGGAAFKPNPINYILGLDIGIASVGWAMV |
| | sequence for | EIDEEENPIRLIDLGVRVFERAEVPKTGDSLAMARRLARSVRRLTRRRA |
| | Nme2Cas9 with | HRLLRARRLLKREGVLQAADFDENGLIKSLPNTPWQLRAAALDRKLTP |
| | HiBiT tag | LEWSAVLLHLIKHRGYLSQRKNEGETADKELGALLKGVANNAHALQT |
| | encoded by | GDFRTPAELALNKFEKESGHIRNQRGDYSHTFSRKDLQAELILLFEKQK |
| | mRNA M | EFGNPHVSGGLKEGIETLLMTQRPALSGDAVQKMLGHCTFEPAEPKAA |
| | | KNTYTAERFIWLTKLNNLRILEQGSERPLTDTERATLMDEPYRKSKLTY |
| | | AQARKLLGLEDTAFFKGLRYGKDNAEASTLMEMKAYHAISRALEKEG |
| | | LKDKKSPLNLSSELQDEIGTAFSLFKTDEDITGRLKDRVQPEILEALLKH |
| | | ISFDKFVQISLKALRRIVPLMEQGKRYDEACAEIYGDHYGKKNTEEKIY |
| | | LPPIPADEIRNPVVLRALSQARKVINGVVRRYGSPARIHIETAREVGKSF |
| | | KDRKEIEKRQEENRKDREKAAAKFREYFPNFVGEPKSKDILKLRLYEQ |
| | | QHGKCLYSGKEINLVRLNEKGYVEIDHALPFSRTWDDSFNNKVLVLGS |
| | | ENQNKGNQTPYEYFNGKDNSREWQEFKARVETSRFPRSKKQRILLQKF |
| | | DEDGFKECNLNDTRYVNRFLCQFVADHILLTGKGKRRVFASNGQITNL |
| | | LRGFWGLRKVRAENDRHHALDAVVVACSTVAMQQKITRFVRYKEMN |
| | | AFDGKTIDKETGKVLHQKTHFPQPWEFFAQEVMIRVFGKPDGKPEFEE |
| | | ADTPEKLRTLLAEKLSSRPEAVHEYVTPLFVSRAPNRKMSGAHKDTLR |
| | | SAKRFVKHNEKISVKRVWLTEIKLADLENMVNYKNGREIELYEALKA |
| | | RLEAYGGNAKQAFDPKDNPFYKKGGQLVKAVRVEKTQESGVLLNKK |
| | | NAYTIADNGDMVRVDVFCKVDKKGKNQYFIVPIYAWQVAENILPDID |
| | | CKGYRIDDSYTFCFSLHKYDLIAFQKDEKSKVEFAYYINCDSSNGRFYL |
| | | AWHDKGSKEQQFRISTQNLVLIQKYQVNELGKEIRPCRLKKRPPVRSES |
| | | ATPESVSGWRLFKKIS |
| 164 | Amino acid | MDGSGGGSPKKKRKVGGSGGGAAFKPNPINYILGLDIGIASVGWAMV |
| | sequence for | EIDEEENPIRLIDLGVRVFERAEVPKTGDSLAMARRLARSVRRLTRRRA |
| | Nme2Cas9 | HRLLRARRLLKREGVLQAADFDENGLIKSLPNTPWQLRAAALDRKLTP |
| | encoded by | LEWSAVLLHLIKHRGYLSQRKNEGETADKELGALLKGVANNAHALQT |
| | mRNA N | GDFRTPAELALNKFEKESGHIRNQRGDYSHTFSRKDLQAELILLFEKQK |
| | | EFGNPHVSGGLKEGIETLLMTQRPALSGDAVQKMLGHCTFEPAEPKAA |
| | | KNTYTAERFIWLTKLNNLRILEQGSERPLTDTERATLMDEPYRKSKLTY |
| | | AQARKLLGLEDTAFFKGLRYGKDNAEASTLMEMKAYHAISRALEKEG |
| | | LKDKKSPLNLSSELQDEIGTAFSLFKTDEDITGRLKDRVQPEILEALLKH |
| | | ISFDKFVQISLKALRRIVPLMEQGKRYDEACAEIYGDHYGKKNTEEKIY |
| | | LPPIPADEIRNPVVLRALSQARKVINGVVRRYGSPARIHIETAREVGKSF |
| | | KDRKEIEKRQEENRKDREKAAAKFREYFPNFVGEPKSKDILKLRLYEQ |
| | | QHGKCLYSGKEINLVRLNEKGYVEIDHALPFSRTWDDSFNNKVLVLGS |
| | | ENQNKGNQTPYEYFNGKDNSREWQEFKARVETSRFPRSKKQRILLQKF |
| | | DEDGFKECNLNDTRYVNRFLCQFVADHILLTGKGKRRVFASNGQITNL |
| | | LRGFWGLRKVRAENDRHHALDAVVVACSTVAMQQKITRFVRYKEMN |
| | | AFDGKTIDKETGKVLHQKTHFPQPWEFFAQEVMIRVFGKPDGKPEFEE |
| | | ADTPEKLRTLLAEKLSSRPEAVHEYVTPLFVSRAPNRKMSGAHKDTLR |
| | | SAKRFVKHNEKISVKRVWLTEIKLADLENMVNYKNGREIELYEALKA |
| | | RLEAYGGNAKQAFDPKDNPFYKKGGQLVKAVRVEKTQESGVLLNKK |
| | | NAYTIADNGDMVRVDVFCKVDKKGKNQYFIVPIYAWQVAENILPDID |
| | | CKGYRIDDSYTFCFSLHKYDLIAFQKDEKSKVEFAYYINCDSSNGRFYL |
| | | AWHDKGSKEQQFRISTQNLVLIQKYQVNELGKEIRPCRLKKRPPVRSG |
| | | KRTADGSGGGSPAAKKKKLD |
| 165 | Amino acid | MDGSGGGSPKKKRKVEDKRPAATKKAGQAKKKKGGSGGGAAFKPNP |
| | sequence for | INYILGLDIGIASVGWAMVEIDEEENPIRLIDLGVRVFERAEVPKTGDSL |
| | Nme2Cas9 | AMARRLARSVRRLTRRRAHRLLRARRLLKREGVLQAADFDENGLIKS |
| | encoded by | LPNTPWQLRAAALDRKLTPLEWSAVLLHLIKHRGYLSQRKNEGETAD |
| | mRNA O | KELGALLKGVANNAHALQTGDFRTPAELALNKFEKESGHIRNQRGDY |
| | | SHTFSRKDLQAELILLFEKQKEFGNPHVSGGLKEGIETLLMTQRPALSG |
| | | DAVQKMLGHCTFEPAEPKAAKNTYTAERFIWLTKLNNLRILEQGSERP |
| | | LTDTERATLMDEPYRKSKLTYAQARKLLGLEDTAFFKGLRYGKDNAE |
| | | ASTLMEMKAYHAISRALEKEGLKDKKSPLNLSSELQDEIGTAFSLFKTD |
| | | EDITGRLKDRVQPEILEALLKHISFDKFVQISLKALRRIVPLMEQGKRYD |
| | | EACAEIYGDHYGKKNTEEKIYLPPIPADEIRNPVVLRALSQARKVINGV |
| | | VRRYGSPARIHIETAREVGKSFKDRKEIEKRQEENRKDREKAAAKFRE |
| | | YFPNFVGEPKSKDILKLRLYEQQHGKCLYSGKEINLVRLNEKGYVEID |
| | | HALPFSRTWDDSFNNKVLVLGSENQNKGNQTPYEYFNGKDNSREWQE |
| | | FKARVETSRFPRSKKQRILLQKFDEDGFKECNLNDTRYVNRFLCQFVA |
| | | DHILLTGKGKRRVFASNGQITNLLRGFWGLRKVRAENDRHHALDAVV |
| | | VACSTVAMQQKITRFVRYKEMNAFDGKTIDKETGKVLHQKTHFPQPW |
| | | EFFAQEVMIRVFGKPDGKPEFEEADTPEKLRTLLAEKLSSRPEAVHEYV |
| | | TPLFVSRAPNRKMSGAHKDTLRSAKRFVKHNEKISVKRVWLTEIKLAD |
| | | LENMVNYKNGREIELYEALKARLEAYGGNAKQAFDPKDNPFYKKGG |
| | | QLVKAVRVEKTQESGVLLNKKNAYTIADNGDMVRVDVFCKVDKKGK |
| | | NQYFIVPIYAWQVAENILPDIDCKGYRIDDSYTFCFSLHKYDLIAFQKD |
| | | EKSKVEFAYYINCDSSNGRFYLAWHDKGSKEQQFRISTQNLVLIQKYQ |
| | | VNELGKEIRPCRLKKRPPVR |
| 166 | Amino acid | MDGSGGGSPKKKRKVEDKRPAATKKAGQAKKKKGGSGGGAAFKPNP |
| | sequence for | INYILGLDIGIASVGWAMVEIDEEENPIRLIDLGVRVFERAEVPKTGDSL |
| | Nme2Cas9 with | AMARRLARSVRRLTRRRAHRLLRARRLLKREGVLQAADFDENGLIKS |
| | HiBiT tag | LPNTPWQLRAAALDRKLTPLEWSAVLLHLIKHRGYLSQRKNEGETAD |
| | encoded by | KELGALLKGVANNAHALQTGDFRTPAELALNKFEKESGHIRNQRGDY |
| | mRNA P | SHTFSRKDLQAELILLFEKQKEFGNPHVSGGLKEGIETLLMTQRPALSG |
| | | DAVQKMLGHCTFEPAEPKAAKNTYTAERFIWLTKLNNLRILEQGSERP |
| | | LTDTERATLMDEPYRKSKLTYAQARKLLGLEDTAFFKGLRYGKDNAE |
| | | ASTLMEMKAYHAISRALEKEGLKDKKSPLNLSSELQDEIGTAFSLFKTD |
| | | EDITGRLKDRVQPEILEALLKHISFDKFVQISLKALRRIVPLMEQGKRYD |
| | | EACAEIYGDHYGKKNTEEKIYLPPIPADEIRNPVVLRALSQARKVINGV |
| | | VRRYGSPARIHIETAREVGKSFKDRKEIEKRQEENRKDREKAAAKFRE |
| | | YFPNFVGEPKSKDILKLRLYEQQHGKCLYSGKEINLVRLNEKGYVEID |
| | | HALPFSRTWDDSFNNKVLVLGSENQNKGNQTPYEYFNGKDNSREWQE |
| | | FKARVETSRFPRSKKQRILLQKFDEDGFKECNLNDTRYVNRFLCQFVA |
| | | DHILLTGKGKRRVFASNGQITNLLRGFWGLRKVRAENDRHHALDAVV |
| | | VACSTVAMQQKITRFVRYKEMNAFDGKTIDKETGKVLHQKTHFPQPW |
| | | EFFAQEVMIRVFGKPDGKPEFEEADTPEKLRTLLAEKLSSRPEAVHEYV |
| | | TPLFVSRAPNRKMSGAHKDTLRSAKRFVKHNEKISVKRVWLTEIKLAD |
| | | LENMVNYKNGREIELYEALKARLEAYGGNAKQAFDPKDNPFYKKGG |
| | | QLVKAVRVEKTQESGVLLNKKNAYTIADNGDMVRVDVFCKVDKKGK |
| | | NQYFIVPIYAWQVAENILPDIDCKGYRIDDSYTFCFSLHKYDLIAFQKD |
| | | EKSKVEFAYYINCDSSNGRFYLAWHDKGSKEQQFRISTQNLVLIQKYQ |
| | | VNELGKEIRPCRLKKRPPVRSESATPESVSGWRLFKKIS |
| 167 | Amino acid | MDGSGGGSEDKRPAATKKAGQAKKKKGGSGGGAAFKPNPINYILGLD |
| | sequence for | IGIASVGWAMVEIDEEENPIRLIDLGVRVFERAEVPKTGDSLAMARRLA |
| | Nme2Cas9 | RSVRRLTRRRAHRLLRARRLLKREGVLQAADFDENGLIKSLPNTPWQL |
| | encoded by | RAAALDRKLTPLEWSAVLLHLIKHRGYLSQRKNEGETADKELGALLK |
| | mRNA Q | GVANNAHALQTGDFRTPAELALNKFEKESGHIRNQRGDYSHTFSRKDL |
| | | QAELILLFEKQKEFGNPHVSGGLKEGIETLLMTQRPALSGDAVQKMLG |
| | | HCTFEPAEPKAAKNTYTAERFIWLTKLNNLRILEQGSERPLTDTERATL |
| | | MDEPYRKSKLTYAQARKLLGLEDTAFFKGLRYGKDNAEASTLMEMK |
| | | AYHAISRALEKEGLKDKKSPLNLSSELQDEIGTAFSLFKTDEDITGRLK |
| | | DRVQPEILEALLKHISFDKFVQISLKALRRIVPLMEQGKRYDEACAEIY |
| | | GDHYGKKNTEEKIYLPPIPADEIRNPVVLRALSQARKVINGVVRRYGSP |
| | | ARIHIETAREVGKSFKDRKEIEKRQEENRKDREKAAAKFREYFPNFVGE |
| | | PKSKDILKLRLYEQQHGKCLYSGKEINLVRLNEKGYVEIDHALPFSRT |
| | | WDDSFNNKVLVLGSENQNKGNQTPYEYFNGKDNSREWQEFKARVET |
| | | SRFPRSKKQRILLQKFDEDGFKECNLNDTRYVNRFLCQFVADHILLTGK |
| | | GKRRVFASNGQITNLLRGFWGLRKVRAENDRHHALDAVVVACSTVA |
| | | MQQKITRFVRYKEMNAFDGKTIDKETGKVLHQKTHFPQPWEFFAQEV |
| | | MIRVFGKPDGKPEFEEADTPEKLRTLLAEKLSSRPEAVHEYVTPLFVSR |
| | | APNRKMSGAHKDTLRSAKRFVKHNEKISVKRVWLTEIKLADLENMVN |
| | | YKNGREIELYEALKARLEAYGGNAKQAFDPKDNPFYKKGGQLVKAV |
| | | RVEKTQESGVLLNKKNAYTIADNGDMVRVDVFCKVDKKGKNQYFIV |
| | | PIYAWQVAENILPDIDCKGYRIDDSYTFCFSLHKYDLIAFQKDEKSKVE |
| | | FAYYINCDSSNGRFYLAWHDKGSKEQQFRISTQNLVLIQKYQVNELGK |
| | | EIRPCRLKKRPPVR |
| 168 | mRNA C | GGGAAGCUCAGAAUAAACGCUCAACUUUGGCCGGAUCUGCCACCA |
| | encoding | UGACCGGUGCCGCCUUCAAGCCCAACCCCAUCAACUACAUCCUGG |
| | Nme2Cas9 | GCCUGGACAUCGGCAUCGCCUCCGUGGGCUGGGCCAUGGUGGAGA |
| | | UCGACGAGGAGGAGAACCCCAUCCGGCUGAUCGACCUGGGCGUGC |
| | | GGGUGUUCGAGCGGGCCGAGGUGCCCAAGACCGGCGACUCCCUGG |
| | | CCAUGGCCCGGCGGCUGGCCCGGUCCGUGCGGCGGCUGACCCGGC |
| | | GGCGGGCCCACCGGCUGCUGCGGGCCCGGCGGCUGCUGAAGCGGG |
| | | AGGGCGUGCUGCAGGCCGCCGACUUCGACGAGAACGGCCUGAUCA |
| | | AGUCCCUGCCCAACACCCCCUGGCAGCUGCGGGCCGCCGCCCUGG |
| | | ACCGGAAGCUGACCCCCCUGGAGUGGUCCGCCGUGCUGCUGCACC |
| | | UGAUCAAGCACCGGGGCUACCUGUCCCAGCGGAAGAACGAGGGCG |
| | | AGACCGCCGACAAGGAGCUGGGCGCCCUGCUGAAGGGCGUGGCCA |
| | | ACAACGCCCACGCCCUGCAGACCGGCGACUUCCGGACCCCCGCCG |
| | | AGCUGGCCCUGAACAAGUUCGAGAAGGAGUCCGGCCACAUCCGGA |
| | | ACCAGCGGGGCGACUACUCCCACACCUUCUCCCGGAAGGACCUGC |
| | | AGGCCGAGCUGAUCCUGCUGUUCGAGAAGCAGAAGGAGUUCGGC |
| | | AACCCCCACGUGUCCGGCGGCCUGAAGGAGGGCAUCGAGACCCUG |
| | | CUGAUGACCCAGCGGCCCGCCCUGUCCGGCGACGCCGUGCAGAAG |
| | | AUGCUGGGCCACUGCACCUUCGAGCCCGCCGAGCCCAAGGCCGCC |
| | | AAGAACACCUACACCGCCGAGCGGUUCAUCUGGCUGACCAAGCUG |
| | | AACAACCUGCGGAUCCUGGAGCAGGGCUCCGAGCGGCCCCUGACC |
| | | GACACCGAGCGGGCCACCCUGAUGGACGAGCCCUACCGGAAGUCC |
| | | AAGCUGACCUACGCCCAGGCCCGGAAGCUGCUGGGCCUGGAGGAC |
| | | ACCGCCUUCUUCAAGGGCCUGCGGUACGGCAAGGACAACGCCGAG |
| | | GCCUCCACCCUGAUGGAGAUGAAGGCCUACCACGCCAUCUCCCGG |
| | | GCCCUGGAGAAGGAGGGCCUGAAGGACAAGAAGUCCCCCCUGAAC |
| | | CUGUCCUCCGAGCUGCAGGACGAGAUCGGCACCGCCUUCUCCCUG |
| | | UUCAAGACCGACGAGGACAUCACCGGCCGGCUGAAGGACCGGGUG |
| | | CAGCCCGAGAUCCUGGAGGCCCUGCUGAAGCACAUCUCCUUCGAC |
| | | AAGUUCGUGCAGAUCUCCCUGAAGGCCCUGCGGCGGAUCGUGCCC |
| | | CUGAUGGAGCAGGGCAAGCGGUACGACGAGGCCUGCGCCGAGAU |
| | | CUACGGCGACCACUACGGCAAGAAGAACACCGAGGAGAAGAUCU |
| | | ACCUGCCCCCCAUCCCCGCCGACGAGAUCCGGAACCCCGUGGUGC |
| | | UGCGGGCCCUGUCCCAGGCCCGGAAGGUGAUCAACGGCGUGGUGC |
| | | GGCGGUACGGCUCCCCCGCCCGGAUCCACAUCGAGACCGCCCGGG |
| | | AGGUGGGCAAGUCCUUCAAGGACCGGAAGGAGAUCGAGAAGCGG |
| | | CAGGAGGAGAACCGGAAGGACCGGGAGAAGGCCGCCGCCAAGUU |
| | | CCGGGAGUACUUCCCCAACUUCGUGGGCGAGCCCAAGUCCAAGGA |
| | | CAUCCUGAAGCUGCGGCUGUACGAGCAGCAGCACGGCAAGUGCCU |
| | | GUACUCCGGCAAGGAGAUCAACCUGGUGCGGCUGAACGAGAAGG |
| | | GCUACGUGGAGAUCGACCACGCCCUGCCCUUCUCCCGGACCUGGG |
| | | ACGACUCCUUCAACAACAAGGUGCUGGUGCUGGGCUCCGAGAACC |
| | | AGAACAAGGGCAACCAGACCCCCUACGAGUACUUCAACGGCAAGG |
| | | ACAACUCCCGGGAGUGGCAGGAGUUCAAGGCCCGGGUGGAGACC |
| | | UCCCGGUUCCCCCGGUCCAAGAAGCAGCGGAUCCUGCUGCAGAAG |
| | | UUCGACGAGGACGGCUUCAAGGAGUGCAACCUGAACGACACCCGG |
| | | UACGUGAACCGCUUCCUGUGCCAGUUCGUGGCCGACCACAUCCUG |
| | | CUGACCGGCAAGGGCAAGCGGCGGGUGUUCGCCUCCAACGGCCAG |
| | | AUCACCAACCUGCUGCGGGGCUUCUGGGGCCUGCGGAAGGUGCGG |
| | | GCCGAGAACGACCGGCACCACGCCCUGGACGCCGUGGUGGUGGCC |
| | | UGCUCCACCGUGGCCAUGCAGCAGAAGAUCACCCGGUUCGUGCGG |
| | | UACAAGGAGAUGAACGCCUUCGACGGCAAGACCAUCGACAAGGA |
| | | GACCGGCAAGGUGCUGCACCAGAAGACCCACUUCCCCCAGCCCUG |
| | | GGAGUUCUUCGCCCAGGAGGUGAUGAUCCGGGUGUUCGGCAAGC |
| | | CCGACGGCAAGCCCGAGUUCGAGGAGGCCGACACCCCCGAGAAGC |
| | | UGCGGACCCUGCUGGCCGAGAAGCUGUCCUCCCGGCCCGAGGCCG |
| | | UGCACGAGUACGUGACCCCCCUGUUCGUGUCCCGGGCCCCCAACC |
| | | GGAAGAUGUCCGGCGCCCACAAGGACACCCUGCGGUCCGCCAAGC |
| | | GGUUCGUGAAGCACAACGAGAAGAUCUCCGUGAAGCGGGUGUGG |
| | | CUGACCGAGAUCAAGCUGGCCGACCUGGAGAACAUGGUGAACUA |
| | | CAAGAACGGCCGGGAGAUCGAGCUGUACGAGGCCCUGAAGGCCCG |
| | | GCUGGAGGCCUACGGCGGCAACGCCAAGCAGGCCUUCGACCCCAA |
| | | GGACAACCCCUUCUACAAGAAGGGCGGCCAGCUGGUGAAGGCCGU |
| | | GCGGGUGGAGAAGACCCAGGAGUCCGGCGUGCUGCUGAACAAGA |
| | | AGAACGCCUACACCAUCGCCGACAACGGCGACAUGGUGCGGGUGG |
| | | ACGUGUUCUGCAAGGUGGACAAGAAGGGCAAGAACCAGUACUUC |
| | | AUCGUGCCCAUCUACGCCUGGCAGGUGGCCGAGAACAUCCUGCCC |
| | | GACAUCGACUGCAAGGGCUACCGGAUCGACGACUCCUACACCUUC |
| | | UGCUUCUCCCUGCACAAGUACGACCUGAUCGCCUUCCAGAAGGAC |
| | | GAGAAGUCCAAGGUGGAGUUCGCCUACUACAUCAACUGCGACUCC |
| | | UCCAACGGCCGGUUCUACCUGGCCUGGCACGACAAGGGCUCCAAG |
| | | GAGCAGCAGUUCCGGAUCUCCACCCAGAACCUGGUGCUGAUCCAG |
| | | AAGUACCAGGUGAACGAGCUGGGCAAGGAGAUCCGGCCCUGCCG |
| | | GCUGAAGAAGCGGCCCCCCGUGCGGUCCGGAAAGCGGACCGCCGA |
| | | CGGCUCCGAGUUCGAGUCCCCCAAGAAGAAGCGGAAGGUGGAGU |
| | | AGCUAGCACCAGCCUCAAGAACACCCGAAUGGAGUCUCUAAGCUA |
| | | CAUAAUACCAACUUACACUUUACAAAAUGUUGUCCCCCAAAAUG |
| | | UAGCCAUUCGUAUCUGCUCCUAAUAAAAAGAAAGUUUCUUCACA |
| | | UUCUCUCGAGAAAAAAAAAAAAUGGAAAAAAAAAAAACGGAAAA |
| | | AAAAAAAAGGUAAAAAAAAAAAAUAUAAAAAAAAAAAACAUAAA |
| | | AAAAAAAAACGAAAAAAAAAAAACGUAAAAAAAAAAAACUCAAA |
| | | AAAAAAAAAGAUAAAAAAAAAAAACCUAAAAAAAAAAAAUGUAA |
| | | AAAAAAAAAAGGGAAAAAAAAAAAACGCAAAAAAAAAAAACACA |
| | | AAAAAAAAAAAUGCAAAAAAAAAAAAUCGAAAAAAAAAAAAUCU |
| | | AAAAAAAAAAAACGAAAAAAAAAAAACCCAAAAAAAAAAAAGAC |
| | | AAAAAAAAAAAAUAGAAAAAAAAAAAAGUUAAAAAA |
| 169 | mRNA H | GGGaagctcagaataaacgctcaactttggccggatctgccacCATGGCCGCCTTCAAGCC |
| | encoding | CAACCCCATCAACTACATCCTGGGCCTGGACATCGGCATCGCCTCC |
| | Nme2Cas9 | GTGGGCTGGGCCATGGTGGAGATCGACGAGGAGGAGAACCCCATC |
| | | CGGCTGATCGACCTGGGCGTGCGGGTGTTCGAGCGGGCCGAGGTGC |
| | | CCAAGACCGGCGACTCCCTGGCCATGGCCCGGCGGCTGGCCCGGTC |
| | | CGTGCGGCGGCTGACCCGGCGGCGGGCCCACCGGCTGCTGCGGGCC |
| | | CGGCGGCTGCTGAAGCGGGAGGGCGTGCTGCAGGCCGCCGACTTCG |
| | | ACGAGAACGGCCTGATCAAGTCCCTGCCCAACACCCCCTGGCAGCT |
| | | GCGGGCCGCCGCCCTGGACCGGAAGCTGACCCCCCTGGAGTGGTCC |
| | | GCCGTGCTGCTGCACCTGATCAAGCACCGGGGCTACCTGTCCCAGC |
| | | GGAAGAACGAGGGCGAGACCGCCGACAAGGAGCTGGGCGCCCTGC |
| | | TGAAGGGCGTGGCCAACAACGCCCACGCCCTGCAGACCGGCGACTT |
| | | CCGGACCCCCGCCGAGCTGGCCCTGAACAAGTTCGAGAAGGAGTCC |
| | | GGCCACATCCGGAACCAGCGGGGCGACTACTCCCACACCTTCTCCC |
| | | GGAAGGACCTGCAGGCCGAGCTGATCCTGCTGTTCGAGAAGCAGA |
| | | AGGAGTTCGGCAACCCCCACGTGTCCGGCGGCCTGAAGGAGGGCAT |
| | | CGAGACCCTGCTGATGACCCAGCGGCCCGCCCTGTCCGGCGACGCC |
| | | GTGCAGAAGATGCTGGGCCACTGCACCTTCGAGCCCGCCGAGCCCA |
| | | AGGCCGCCAAGAACACCTACACCGCCGAGCGGTTCATCTGGCTGAC |
| | | CAAGCTGAACAACCTGCGGATCCTGGAGCAGGGCTCCGAGCGGCCC |
| | | CTGACCGACACCGAGCGGGCCACCCTGATGGACGAGCCCTACCGGA |
| | | AGTCCAAGCTGACCTACGCCCAGGCCCGGAAGCTGCTGGGCCTGGA |
| | | GGACACCGCCTTCTTCAAGGGCCTGCGGTACGGCAAGGACAACGCC |
| | | GAGGCCTCCACCCTGATGGAGATGAAGGCCTACCACGCCATCTCCC |
| | | GGGCCCTGGAGAAGGAGGGCCTGAAGGACAAGAAGTCCCCCCTGA |
| | | ACCTGTCCTCCGAGCTGCAGGACGAGATCGGCACCGCCTTCTCCCT |
| | | GTTCAAGACCGACGAGGACATCACCGGCCGGCTGAAGGACCGGGT |
| | | GCAGCCCGAGATCCTGGAGGCCCTGCTGAAGCACATCTCCTTCGAC |
| | | AAGTTCGTGCAGATCTCCCTGAAGGCCCTGCGGCGGATCGTGCCCC |
| | | TGATGGAGCAGGGCAAGCGGTACGACGAGGCCTGCGCCGAGATCT |
| | | ACGGCGACCACTACGGCAAGAAGAACACCGAGGAGAAGATCTACC |
| | | TGCCCCCCATCCCCGCCGACGAGATCCGGAACCCCGTGGTGCTGCG |
| | | GGCCCTGTCCCAGGCCCGGAAGGTGATCAACGGCGTGGTGCGGCGG |
| | | TACGGCTCCCCCGCCCGGATCCACATCGAGACCGCCCGGGAGGTGG |
| | | GCAAGTCCTTCAAGGACCGGAAGGAGATCGAGAAGCGGCAGGAGG |
| | | AGAACCGGAAGGACCGGGAGAAGGCCGCCGCCAAGTTCCGGGAGT |
| | | ACTTCCCCAACTTCGTGGGCGAGCCCAAGTCCAAGGACATCCTGAA |
| | | GCTGCGGCTGTACGAGCAGCAGCACGGCAAGTGCCTGTACTCCGGC |
| | | AAGGAGATCAACCTGGTGCGGCTGAACGAGAAGGGCTACGTGGAG |
| | | ATCGACCACGCCCTGCCCTTCTCCCGGACCTGGGACGACTCCTTCAA |
| | | CAACAAGGTGCTGGTGCTGGGCTCCGAGAACCAGAACAAGGGCAA |
| | | CCAGACCCCCTACGAGTACTTCAACGGCAAGGACAACTCCCGGGAG |
| | | TGGCAGGAGTTCAAGGCCCGGGTGGAGACCTCCCGGTTCCCCCGGT |
| | | CCAAGAAGCAGCGGATCCTGCTGCAGAAGTTCGACGAGGACGGCTT |
| | | CAAGGAGTGCAACCTGAACGACACCCGGTACGTGAACCGGTTCCTG |
| | | TGCCAGTTCGTGGCCGACCACATCCTGCTGACCGGCAAGGGCAAGC |
| | | GGCGGGTGTTCGCCTCCAACGGCCAGATCACCAACCTGCTGCGGGG |
| | | CTTCTGGGGCCTGCGGAAGGTGCGGGCCGAGAACGACCGGCACCA |
| | | CGCCCTGGACGCCGTGGTGGTGGCCTGCTCCACCGTGGCCATGCAG |
| | | CAGAAGATCACCCGGTTCGTGCGGTACAAGGAGATGAACGCCTTCG |
| | | ACGGCAAGACCATCGACAAGGAGACCGGCAAGGTGCTGCACCAGA |
| | | AGACCCACTTCCCCCAGCCCTGGGAGTTCTTCGCCCAGGAGGTGAT |
| | | GATCCGGGTGTTCGGCAAGCCCGACGGCAAGCCCGAGTTCGAGGA |
| | | GGCCGACACCCCCGAGAAGCTGCGGACCCTGCTGGCCGAGAAGCT |
| | | GTCCTCCCGGCCCGAGGCCGTGCACGAGTACGTGACCCCCCTGTTC |
| | | GTGTCCCGGGCCCCCAACCGGAAGATGTCCGGCGCCCACAAGGACA |
| | | CCCTGCGGTCCGCCAAGCGGTTCGTGAAGCACAACGAGAAGATCTC |
| | | CGTGAAGCGGGTGTGGCTGACCGAGATCAAGCTGGCCGACCTGGA |
| | | GAACATGGTGAACTACAAGAACGGCCGGGAGATCGAGCTGTACGA |
| | | GGCCCTGAAGGCCCGGCTGGAGGCCTACGGCGGCAACGCCAAGCA |
| | | GGCCTTCGACCCCAAGGACAACCCCTTCTACAAGAAGGGCGGCCAG |
| | | CTGGTGAAGGCCGTGCGGGTGGAGAAGACCCAGGAGTCCGGCGTG |
| | | CTGCTGAACAAGAAGAACGCCTACACCATCGCCGACAACGGCGAC |
| | | ATGGTGCGGGTGGACGTGTTCTGCAAGGTGGACAAGTCCGGCGGCG |
| | | GCTCCCCCAAGAAGAAGCGGAAGGTGTCCGGCGGCTCCGGCAAGA |
| | | ACCAGTACTTCATCGTGCCCATCTACGCCTGGCAGGTGGCCGAGAA |
| | | CATCCTGCCCGACATCGACTGCAAGGGCTACCGGATCGACGACTCC |
| | | TACACCTTCTGCTTCTCCCTGCACAAGTACGACCTGATCGCCTTCCA |
| | | GAAGGACGAGAAGTCCAAGGTGGAGTTCGCCTACTACATCAACTGC |
| | | GACTCCTCCAACGGCCGGTTCTACCTGGCCTGGCACGACAAGGGCT |
| | | CCAAGGAGCAGCAGTTCCGGATCTCCACCCAGAACCTGGTGCTGAT |
| | | CCAGAAGTACCAGGTGAACGAGCTGGGCAAGGAGATCCGGCCCTG |
| | | CCGGCTGAAGAAGCGGCCCCCCGTGCGGTAGCTAGCaccagcctcaagaac |
| | | acccgaatggagtctctaagctacataataccaacttacactttacaaaatgttgtcccccaaaatgtagccattcgt |
| | | atctgctcctaataaaaagaaagtttcttcacattctCTCGAGAAAAAAAAAAAATGGAAA |
| | | AAAAAAAAACGGAAAAAAAAAAAAGGTAAAAAAAAAAAATATAA |
| | | AAAAAAAAAACATAAAAAAAAAAAACGAAAAAAAAAAAACGTAA |
| | | AAAAAAAAAACTCAAAAAAAAAAAAGATAAAAAAAAAAAACCTA |
| | | AAAAAAAAAAATGTAAAAAAAAAAAAGGGAAAAAAAAAAAACGC |
| | | AAAAAAAAAAAACACAAAAAAAAAAAATGCAAAAAAAAAAAATC |
| | | GAAAAAAAAAAAATCTAAAAAAAAAAAACGAAAAAAAAAAAACC |
| | | CAAAAAAAAAAAAGACAAAAAAAAAAAATAGAAAAAAAAAAAAG |
| | | TTAAAAAAAAAAAACTGAAAAAAAAAAAATTTAAAAAAAAAAAAT |
| 170 | mRNA I | GGGaagctcagaataaacgctcaactttggccggatctgccacCATGGTGCCCAAGAAGAA |
| | encoding | GCGGAAGGTGGCCGCCTTCAAGCCCAACCCCATCAACTACATCCTG |
| | Nme2Cas9 | GGCCTGGACATCGGCATCGCCTCCGTGGGCTGGGCCATGGTGGAGA |
| | | TCGACGAGGAGGAGAACCCCATCCGGCTGATCGACCTGGGCGTGCG |
| | | GGTGTTCGAGCGGGCCGAGGTGCCCAAGACCGGCGACTCCCTGGCC |
| | | ATGGCCCGGCGGCTGGCCCGGTCCGTGCGGCGGCTGACCCGGCGGC |
| | | GGGCCCACCGGCTGCTGCGGGCCCGGCGGCTGCTGAAGCGGGAGG |
| | | GCGTGCTGCAGGCCGCCGACTTCGACGAGAACGGCCTGATCAAGTC |
| | | CCTGCCCAACACCCCCTGGCAGCTGCGGGCCGCCGCCCTGGACCGG |
| | | AAGCTGACCCCCCTGGAGTGGTCCGCCGTGCTGCTGCACCTGATCA |
| | | AGCACCGGGGCTACCTGTCCCAGCGGAAGAACGAGGGCGAGACCG |
| | | CCGACAAGGAGCTGGGCGCCCTGCTGAAGGGCGTGGCCAACAACG |
| | | CCCACGCCCTGCAGACCGGCGACTTCCGGACCCCCGCCGAGCTGGC |
| | | CCTGAACAAGTTCGAGAAGGAGTCCGGCCACATCCGGAACCAGCG |
| | | GGGCGACTACTCCCACACCTTCTCCCGGAAGGACCTGCAGGCCGAG |
| | | CTGATCCTGCTGTTCGAGAAGCAGAAGGAGTTCGGCAACCCCCACG |
| | | TGTCCGGCGGCCTGAAGGAGGGCATCGAGACCCTGCTGATGACCCA |
| | | GCGGCCCGCCCTGTCCGGCGACGCCGTGCAGAAGATGCTGGGCCAC |
| | | TGCACCTTCGAGCCCGCCGAGCCCAAGGCCGCCAAGAACACCTACA |
| | | CCGCCGAGCGGTTCATCTGGCTGACCAAGCTGAACAACCTGCGGAT |
| | | CCTGGAGCAGGGCTCCGAGCGGCCCCTGACCGACACCGAGCGGGC |
| | | CACCCTGATGGACGAGCCCTACCGGAAGTCCAAGCTGACCTACGCC |
| | | CAGGCCCGGAAGCTGCTGGGCCTGGAGGACACCGCCTTCTTCAAGG |
| | | GCCTGCGGTACGGCAAGGACAACGCCGAGGCCTCCACCCTGATGGA |
| | | GATGAAGGCCTACCACGCCATCTCCCGGGCCCTGGAGAAGGAGGG |
| | | CCTGAAGGACAAGAAGTCCCCCCTGAACCTGTCCTCCGAGCTGCAG |
| | | GACGAGATCGGCACCGCCTTCTCCCTGTTCAAGACCGACGAGGACA |
| | | TCACCGGCCGGCTGAAGGACCGGGTGCAGCCCGAGATCCTGGAGG |
| | | CCCTGCTGAAGCACATCTCCTTCGACAAGTTCGTGCAGATCTCCCTG |
| | | AAGGCCCTGCGGCGGATCGTGCCCCTGATGGAGCAGGGCAAGCGG |
| | | TACGACGAGGCCTGCGCCGAGATCTACGGCGACCACTACGGCAAG |
| | | AAGAACACCGAGGAGAAGATCTACCTGCCCCCCATCCCCGCCGACG |
| | | AGATCCGGAACCCCGTGGTGCTGCGGGCCCTGTCCCAGGCCCGGAA |
| | | GGTGATCAACGGCGTGGTGCGGCGGTACGGCTCCCCCGCCCGGATC |
| | | CACATCGAGACCGCCCGGGAGGTGGGCAAGTCCTTCAAGGACCGG |
| | | AAGGAGATCGAGAAGCGGCAGGAGGAGAACCGGAAGGACCGGGA |
| | | GAAGGCCGCCGCCAAGTTCCGGGAGTACTTCCCCAACTTCGTGGGC |
| | | GAGCCCAAGTCCAAGGACATCCTGAAGCTGCGGCTGTACGAGCAGC |
| | | AGCACGGCAAGTGCCTGTACTCCGGCAAGGAGATCAACCTGGTGCG |
| | | GCTGAACGAGAAGGGCTACGTGGAGATCGACCACGCCCTGCCCTTC |
| | | TCCCGGACCTGGGACGACTCCTTCAACAACAAGGTGCTGGTGCTGG |
| | | GCTCCGAGAACCAGAACAAGGGCAACCAGACCCCCTACGAGTACTT |
| | | CAACGGCAAGGACAACTCCCGGGAGTGGCAGGAGTTCAAGGCCCG |
| | | GGTGGAGACCTCCCGGTTCCCCCGGTCCAAGAAGCAGCGGATCCTG |
| | | CTGCAGAAGTTCGACGAGGACGGCTTCAAGGAGTGCAACCTGAAC |
| | | GACACCCGGTACGTGAACCGGTTCCTGTGCCAGTTCGTGGCCGACC |
| | | ACATCCTGCTGACCGGCAAGGGCAAGCGGCGGGTGTTCGCCTCCAA |
| | | CGGCCAGATCACCAACCTGCTGCGGGGCTTCTGGGGCCTGCGGAAG |
| | | GTGCGGGCCGAGAACGACCGGCACCACGCCCTGGACGCCGTGGTG |
| | | GTGGCCTGCTCCACCGTGGCCATGCAGCAGAAGATCACCCGGTTCG |
| | | TGCGGTACAAGGAGATGAACGCCTTCGACGGCAAGACCATCGACA |
| | | AGGAGACCGGCAAGGTGCTGCACCAGAAGACCCACTTCCCCCAGCC |
| | | CTGGGAGTTCTTCGCCCAGGAGGTGATGATCCGGGTGTTCGGCAAG |
| | | CCCGACGGCAAGCCCGAGTTCGAGGAGGCCGACACCCCCGAGAAG |
| | | CTGCGGACCCTGCTGGCCGAGAAGCTGTCCTCCCGGCCCGAGGCCG |
| | | TGCACGAGTACGTGACCCCCCTGTTCGTGTCCCGGGCCCCCAACCG |
| | | GAAGATGTCCGGCGCCCACAAGGACACCCTGCGGTCCGCCAAGCG |
| | | GTTCGTGAAGCACAACGAGAAGATCTCCGTGAAGCGGGTGTGGCTG |
| | | ACCGAGATCAAGCTGGCCGACCTGGAGAACATGGTGAACTACAAG |
| | | AACGGCCGGGAGATCGAGCTGTACGAGGCCCTGAAGGCCCGGCTG |
| | | GAGGCCTACGGCGGCAACGCCAAGCAGGCCTTCGACCCCAAGGAC |
| | | AACCCCTTCTACAAGAAGGGCGGCCAGCTGGTGAAGGCCGTGCGG |
| | | GTGGAGAAGACCCAGGAGTCCGGCGTGCTGCTGAACAAGAAGAAC |
| | | GCCTACACCATCGCCGACAACGGCGACATGGTGCGGGTGGACGTGT |
| | | TCTGCAAGGTGGACAAGAAGGGCAAGAACCAGTACTTCATCGTGCC |
| | | CATCTACGCCTGGCAGGTGGCCGAGAACATCCTGCCCGACATCGAC |
| | | TGCAAGGGCTACCGGATCGACGACTCCTACACCTTCTGCTTCTCCCT |
| | | GCACAAGTACGACCTGATCGCCTTCCAGAAGGACGAGAAGTCCAA |
| | | GGTGGAGTTCGCCTACTACATCAACTGCGACTCCTCCAACGGCCGG |
| | | TTCTACCTGGCCTGGCACGACAAGGGCTCCAAGGAGCAGCAGTTCC |
| | | GGATCTCCACCCAGAACCTGGTGCTGATCCAGAAGTACCAGGTGAA |
| | | CGAGCTGGGCAAGGAGATCCGGCCCTGCCGGCTGAAGAAGCGGCC |
| | | CCCCGTGCGGTACCCCTACGACGTGCCCGACTACGCCGCCGCCCCC |
| | | GCCGCCAAGAAGAAGAAGCTGGACTAGCTAGCaccagcctcaagaacacccga |
| | | atggagtctctaagctacataataccaacttacactttacaaaatgttgtcccccaaaatgtagccattcgtatctgct |
| | | cctaataaaaagaaagtttcttcacattctCTCGAGAAAAAAAAAAAATGGAAAAAAA |
| | | AAAAACGGAAAAAAAAAAAAGGTAAAAAAAAAAAATATAAAAAA |
| | | AAAAAACATAAAAAAAAAAAACGAAAAAAAAAAAACGTAAAAAA |
| | | AAAAAACTCAAAAAAAAAAAAGATAAAAAAAAAAAACCTAAAAA |
| | | AAAAAAATGTAAAAAAAAAAAAGGGAAAAAAAAAAAACGCAAAA |
| | | AAAAAAAACACAAAAAAAAAAAATGCAAAAAAAAAAAATCGAAA |
| | | AAAAAAAAATCTAAAAAAAAAAAACGAAAAAAAAAAAACCCAAA |
| | | AAAAAAAAAGACAAAAAAAAAAAATAGAAAAAAAAAAAAGTTAA |
| | | AAAAAAAAAACTGAAAAAAAAAAAATTTAAAAAAAAAAAAT |
| 171 | mRNA J | GGGAAGCUCAGAAUAAACGCUCAACUUUGGCCGGAUCUGCCACCA |
| | encoding | UGGUGCCCAAGAAGAAGCGGAAGGUGGAGGACAAGCGGCCCGCC |
| | Nme2Cas9 | GCCACCAAGAAGGCCGGCCAGGCCAAGAAGAAGAAGAUGGCCGCC |
| | | UUCAAGCCCAACCCCAUCAACUACAUCCUGGGCCUGGACAUCGGC |
| | | AUCGCCUCCGUGGGCUGGGCCAUGGUGGAGAUCGACGAGGAGGA |
| | | GAACCCCAUCCGGCUGAUCGACCUGGGCGUGCGGGUGUUCGAGCG |
| | | GGCCGAGGUGCCCAAGACCGGCGACUCCCUGGCCAUGGCCCGGCG |
| | | GCUGGCCCGGUCCGUGCGGCGGCUGACCCGGCGGCGGGCCCACCG |
| | | GCUGCUGCGGGCCCGGCGGCUGCUGAAGCGGGAGGGCGUGCUGCA |
| | | GGCCGCCGACUUCGACGAGAACGGCCUGAUCAAGUCCCUGCCCAA |
| | | CACCCCCUGGCAGCUGCGGGCCGCCGCCCUGGACCGGAAGCUGAC |
| | | CCCCCUGGAGUGGUCCGCCGUGCUGCUGCACCUGAUCAAGCACCG |
| | | GGGCUACCUGUCCCAGCGGAAGAACGAGGGCGAGACCGCCGACAA |
| | | GGAGCUGGGCGCCCUGCUGAAGGGCGUGGCCAACAACGCCCACGC |
| | | CCUGCAGACCGGCGACUUCCGGACCCCCGCCGAGCUGGCCCUGAA |
| | | CAAGUUCGAGAAGGAGUCCGGCCACAUCCGGAACCAGCGGGGCGA |
| | | CUACUCCCACACCUUCUCCCGGAAGGACCUGCAGGCCGAGCUGAU |
| | | CCUGCUGUUCGAGAAGCAGAAGGAGUUCGGCAACCCCCACGUGUC |
| | | CGGCGGCCUGAAGGAGGGCAUCGAGACCCUGCUGAUGACCCAGCG |
| | | GCCCGCCCUGUCCGGCGACGCCGUGCAGAAGAUGCUGGGCCACUG |
| | | CACCUUCGAGCCCGCCGAGCCCAAGGCCGCCAAGAACACCUACAC |
| | | CGCCGAGCGGUUCAUCUGGCUGACCAAGCUGAACAACCUGCGGAU |
| | | CCUGGAGCAGGGCUCCGAGCGGCCCCUGACCGACACCGAGCGGGC |
| | | CACCCUGAUGGACGAGCCCUACCGGAAGUCCAAGCUGACCUACGC |
| | | CCAGGCCCGGAAGCUGCUGGGCCUGGAGGACACCGCCUUCUUCAA |
| | | GGGCCUGCGGUACGGCAAGGACAACGCCGAGGCCUCCACCCUGAU |
| | | GGAGAUGAAGGCCUACCACGCCAUCUCCCGGGCCCUGGAGAAGGA |
| | | GGGCCUGAAGGACAAGAAGUCCCCCCUGAACCUGUCCUCCGAGCU |
| | | GCAGGACGAGAUCGGCACCGCCUUCUCCCUGUUCAAGACCGACGA |
| | | GGACAUCACCGGCCGGCUGAAGGACCGGGUGCAGCCCGAGAUCCU |
| | | GGAGGCCCUGCUGAAGCACAUCUCCUUCGACAAGUUCGUGCAGAU |
| | | CUCCCUGAAGGCCCUGCGGCGGAUCGUGCCCCUGAUGGAGCAGGG |
| | | CAAGCGGUACGACGAGGCCUGCGCCGAGAUCUACGGCGACCACUA |
| | | CGGCAAGAAGAACACCGAGGAGAAGAUCUACCUGCCCCCCAUCCC |
| | | CGCCGACGAGAUCCGGAACCCCGUGGUGCUGCGGGCCCUGUCCCA |
| | | GGCCCGGAAGGUGAUCAACGGCGUGGUGCGGCGGUACGGCUCCCC |
| | | CGCCCGGAUCCACAUCGAGACCGCCCGGGAGGUGGGCAAGUCCUU |
| | | CAAGGACCGGAAGGAGAUCGAGAAGCGGCAGGAGGAGAACCGGA |
| | | AGGACCGGGAGAAGGCCGCCGCCAAGUUCCGGGAGUACUUCCCCA |
| | | ACUUCGUGGGCGAGCCCAAGUCCAAGGACAUCCUGAAGCUGCGGC |
| | | UGUACGAGCAGCAGCACGGCAAGUGCCUGUACUCCGGCAAGGAG |
| | | AUCAACCUGGUGCGGCUGAACGAGAAGGGCUACGUGGAGAUCGA |
| | | CCACGCCCUGCCCUUCUCCCGGACCUGGGACGACUCCUUCAACAA |
| | | CAAGGUGCUGGUGCUGGGCUCCGAGAACCAGAACAAGGGCAACC |
| | | AGACCCCCUACGAGUACUUCAACGGCAAGGACAACUCCCGGGAGU |
| | | GGCAGGAGUUCAAGGCCCGGGUGGAGACCUCCCGGUUCCCCCGGU |
| | | CCAAGAAGCAGCGGAUCCUGCUGCAGAAGUUCGACGAGGACGGC |
| | | UUCAAGGAGUGCAACCUGAACGACACCCGGUACGUGAACCGGUUC |
| | | CUGUGCCAGUUCGUGGCCGACCACAUCCUGCUGACCGGCAAGGGC |
| | | AAGCGGCGGGUGUUCGCCUCCAACGGCCAGAUCACCAACCUGCUG |
| | | CGGGGCUUCUGGGGCCUGCGGAAGGUGCGGGCCGAGAACGACCG |
| | | GCACCACGCCCUGGACGCCGUGGUGGUGGCCUGCUCCACCGUGGC |
| | | CAUGCAGCAGAAGAUCACCCGGUUCGUGCGGUACAAGGAGAUGA |
| | | ACGCCUUCGACGGCAAGACCAUCGACAAGGAGACCGGCAAGGUGC |
| | | UGCACCAGAAGACCCACUUCCCCCAGCCCUGGGAGUUCUUCGCCC |
| | | AGGAGGUGAUGAUCCGGGUGUUCGGCAAGCCCGACGGCAAGCCC |
| | | GAGUUCGAGGAGGCCGACACCCCCGAGAAGCUGCGGACCCUGCUG |
| | | GCCGAGAAGCUGUCCUCCCGGCCCGAGGCCGUGCACGAGUACGUG |
| | | ACCCCCCUGUUCGUGUCCCGGGCCCCCAACCGGAAGAUGUCCGGC |
| | | GCCCACAAGGACACCCUGCGGUCCGCCAAGCGGUUCGUGAAGCAC |
| | | AACGAGAAGAUCUCCGUGAAGCGGGUGUGGCUGACCGAGAUCAA |
| | | GCUGGCCGACCUGGAGAACAUGGUGAACUACAAGAACGGCCGGG |
| | | AGAUCGAGCUGUACGAGGCCCUGAAGGCCCGGCUGGAGGCCUACG |
| | | GCGGCAACGCCAAGCAGGCCUUCGACCCCAAGGACAACCCCUUCU |
| | | ACAAGAAGGGCGGCCAGCUGGUGAAGGCCGUGCGGGUGGAGAAG |
| | | ACCCAGGAGUCCGGCGUGCUGCUGAACAAGAAGAACGCCUACACC |
| | | AUCGCCGACAACGGCGACAUGGUGCGGGUGGACGUGUUCUGCAA |
| | | GGUGGACAAGAAGGGCAAGAACCAGUACUUCAUCGUGCCCAUCU |
| | | ACGCCUGGCAGGUGGCCGAGAACAUCCUGCCCGACAUCGACUGCA |
| | | AGGGCUACCGGAUCGACGACUCCUACACCUUCUGCUUCUCCCUGC |
| | | ACAAGUACGACCUGAUCGCCUUCCAGAAGGACGAGAAGUCCAAG |
| | | GUGGAGUUCGCCUACUACAUCAACUGCGACUCCUCCAACGGCCGG |
| | | UUCUACCUGGCCUGGCACGACAAGGGCUCCAAGGAGCAGCAGUUC |
| | | CGGAUCUCCACCCAGAACCUGGUGCUGAUCCAGAAGUACCAGGUG |
| | | AACGAGCUGGGCAAGGAGAUCCGGCCCUGCCGGCUGAAGAAGCG |
| | | GCCCCCCGUGCGGGAGGACAAGCGGCCCGCCGCCACCAAGAAGGC |
| | | CGGCCAGGCCAAGAAGAAGAAGUACCCCUACGACGUGCCCGACUA |
| | | CGCCGGCUACCCCUACGACGUGCCCGACUACGCCGGCUCCUACCC |
| | | CUACGACGUGCCCGACUACGCCGCCGCCCCCGCCGCCAAGAAGAA |
| | | GAAGCUGGACUAGCUAGCACCAGCCUCAAGAACACCCGAAUGGAG |
| | | UCUCUAAGCUACAUAAUACCAACUUACACUUUACAAAAUGUUGU |
| | | CCCCCAAAAUGUAGCCAUUCGUAUCUGCUCCUAAUAAAAAGAAA |
| | | GUUUCUUCACAUUCUCUCGAGAAAAAAAAAAAAUGGAAAAAAAA |
| | | AAAACGGAAAAAAAAAAAAGGUAAAAAAAAAAAAUAUAAAAAAA |
| | | AAAAACAUAAAAAAAAAAAACGAAAAAAAAAAAACGUAAAAAAA |
| | | AAAAACUCAAAAAAAAAAAAGAUAAAAAAAAAAAACCUAAAAAA |
| | | AAAAAAUGUAAAAAAAAAAAAGGGAAAAAAAAAAAACGCAAAAA |
| | | AAAAAAACACAAAAAAAAAAAAUGCAAAAAAAAAAAAUCGAAAA |
| | | AAAAAAAAUCUAAAAAAAAAAAACGAAAAAAAAAAAACCCAAAA |
| | | AAAAAAAAGACAAAAAAAAAAAAUAGAAAAAAAAAAAAGUUAAA |
| | | AAAAAAAAACUGAAAAAAAAAAAAUUUAAAAAAAAAAAAUCUAG |
| 172 | mRNA K | GGGaagctcagaataaacgctcaactttggccggatctgccacCatggccgccttcaagcccaaccccatca |
| | encoding | actacatcctgggcctggacatcggcatcgcctccgtgggctgggccatggtggagatcgacgaggaggaga |
| | Nme2Cas9 | accccatccggctgatcgacctgggcgtgcgggtgttcgagcgggccgaggtgcccaagaccggcgactccc |
| | | tggccatggcccggcggctggcccggtccgtgcggcggctgacccggcggcgggcccaccggctgctgcg |
| | | ggcccggcggctgctgaagcgggagggcgtgctgcaggccgccgacttcgacgagaacggcctgatcaagt |
| | | ccctgcccaacaccccctggcagctgcgggccgccgccctggaccggaagctgacccccctggagtggtcc |
| | | gccgtgctgctgcacctgatcaagcaccggggctacctgtcccagcggaagaacgagggcgagaccgccga |
| | | caaggagctgggcgccctgctgaagggcgtggccaacaacgcccacgccctgcagaccggcgacttccgga |
| | | cccccgccgagctggccctgaacaagttcgagaaggagtccggccacatccggaaccagcggggcgactac |
| | | tcccacaccttctcccggaaggacctgcaggccgagctgatcctgctgttcgagaagcagaaggagttcggca |
| | | acccccacgtgtccggcggcctgaaggagggcatcgagaccctgctgatgacccagcggcccgccctgtccg |
| | | gcgacgccgtgcagaagatgctgggccactgcaccttcgagcccgccgagcccaaggccgccaagaacacc |
| | | tacaccgccgagcggttcatctggctgaccaagctgaacaacctgcggatcctggagcagggctccgagcgg |
| | | cccctgaccgacaccgagcgggccaccctgatggacgagccctaccggaagtccaagctgacctacgccca |
| | | ggcccggaagctgctgggcctggaggacaccgccttcttcaagggcctgcggtacggcaaggacaacgccg |
| | | aggcctccaccctgatggagatgaaggcctaccacgccatctcccgggccctggagaaggagggcctgaagg |
| | | acaagaagtcccccctgaacctgtcctccgagctgcaggacgagatcggcaccgccttctccctgttcaagacc |
| | | gacgaggacatcaccggccggctgaaggaccgggtgcagcccgagatcctggaggccctgctgaagcacat |
| | | ctccttcgacaagttcgtgcagatctccctgaaggccctgcggcggatgtgcccctgatggagcagggcaagc |
| | | ggtacgacgaggcctgcgccgagatctacggcgaccactacggcaagaagaacaccgaggagaagatctac |
| | | ctgccccccatccccgccgacgagatccggaaccccgtggtgctggggccctgtcccaggcccggaaggtg |
| | | atcaacggcgtggtgcggcggtacggctcccccgcccggatccacatcgagaccgcccgggaggtgggcaa |
| | | gtccttcaaggaccggaaggagatcgagaagcggcaggaggagaaccggaaggaccgggagaaggccgc |
| | | cgccaagttccgggagtacttccccaacttcgtgggcgagcccaagtccaaggacatcctgaagctgcggctgt |
| | | acgagcagcagcacggcaagtgcctgtactccggcaaggagatcaacctggtgcggctgaacgagaagggc |
| | | tacgtggagatcgaccacgccctgcccttctcccggacctgggacgactccttcaacaacaaggtgctggtgct |
| | | gggctccgagaaccagaacaagggcaaccagaccccctacgagtacttcaacggcaaggacaactcccggg |
| | | agtggcaggagttcaaggcccgggtggagacctcccggttcccccggtccaagaagcagcggatcctgctgc |
| | | agaagttcgacgaggacggcttcaaggagtgcaacctgaacgacacccggtacgtgaaccggttcctgtgcca |
| | | gttcgtggccgaccacatcctgctgaccggcaagggcaagcggcgggtgttcgcctccaacggccagatcac |
| | | caacctgctgcggggcttctggggcctgcggaaggtgcgggccgagaacgaccggcaccacgccctggacg |
| | | ccgtggtggtggcctgctccaccgtggccatgcagcagaagatcacccggttcgtgcggtacaaggagatgaa |
| | | cgccttcgacggcaagaccatcgacaaggagaccggcaaggtgctgcaccagaagacccacttcccccagcc |
| | | ctgggagttcttcgcccaggaggtgatgatccgggtgttcggcaagcccgacggcaagcccgagttcgaggag |
| | | gccgacacccccgagaagctgcggaccctgctggccgagaagctgtcctcccggcccgaggccgtgcacga |
| | | gtacgtgacccccctgttcgtgtcccgggcccccaaccggaagatgtccggcgcccacaaggacaccctgcg |
| | | gtccgccaagcggttcgtgaagcacaacgagaagatctccgtgaagcgggtgtggctgaccgagatcaagctg |
| | | gccgacctggagaacatggtgaactacaagaacggccgggagatcgagctgtacgaggccctgaaggcccg |
| | | gctggaggcctacggcggcaacgccaagcaggccttcgaccccaaggacaaccccttctacaagaagggcg |
| | | gccagctggtgaaggccgtgcgggtggagaagacccaggagtccggcgtgctgctgaacaagaagaacgcc |
| | | tacaccatcgccgacaacggcgacatggtgcgggtggacgtgttctgcaaggtggacaagaagggcaagaac |
| | | cagtacttcatcgtgcccatctacgcctggcaggtggccgagaacatcctgcccgacatcgactgcaagggcta |
| | | ccggatcgacgactcctacaccttctgcttctccctgcacaagtacgacctgatcgccttccagaaggacgagaa |
| | | gtccaaggtggagttcgcctactacatcaactgcgactcctccaacggccggttctacctggcctggcacgacaa |
| | | gggctccaaggagcagcagttccggatctccacccagaacctggtgctgatccagaagtaccaggtgaacgag |
| | | ctgggcaaggagatccggccctgccggctgaagaagcggccccccgtgcggTCCGGAAAGCGG |
| | | ACCGCCGACGGCTCCGGAGGAGGAAGCCCCAAGAAGAAGCGGAAG |
| | | GTGtagctagcaccagcctcaagaacacccgaatggagtctctaagctacataataccaacttacactttacaa |
| | | aatgttgtcccccaaaatgtagccattcgtatctgctcctaataaaaagaaagtttcttcacattctctcgagAAA |
| | | AAAAAAAAATGGAAAAAAAAAAAACGGAAAAAAAAAAAAGGTAA |
| | | AAAAAAAAAATATAAAAAAAAAAAACATAAAAAAAAAAAACGAA |
| | | AAAAAAAAAACGTAAAAAAAAAAACTCAAAAAAAAAAAGATAAA |
| | | AAAAAAAAACCTAAAAAAAAAAAATGTAAAAAAAAAAAAGGGAA |
| | | AAAAAAAAAACGCAAAAAAAAAAAACACAAAAAAAAAAAATGCA |
| | | AAAAAAAAAAATCGAAAAAAAAAAAATCTAAAAAAAAAAAACGA |
| | | AAAAAAAAAAACCCAAAAAAAAAAAAGACAAAAAAAAAAAATAG |
| | | AAAAAAAAAAAGTTAAAAAAAAAAAACTGAAAAAAAAAAAATTTA |
| | | AAAAAAAAAAAT |
| 173 | mRNA L | GGGaagctcagaataaacgctcaactttggccggatctgccacCatgGACGGCTCCGGCGGC |
| | encoding | GGCTCCCCCAAGAAGAAGCGGAAGGTGGGCGGCTCCGGCGGCGGC |
| | Nme2Cas9 | gccgccttcaagcccaaccccatcaactacatcctgggcctggacatcggcatcgcctccgtgggctgggccat |
| | | ggtggagatcgacgaggaggagaaccccatccggctgatcgacctgggcgtgcgggtgttcgagcgggccg |
| | | aggtgcccaagaccggcgactccctggccatggcccggcggctggcccggtccgtgcggcggctgacccgg |
| | | cggcgggcccaccggctgctgcgggcccggcggctgctgaagcgggagggcgtgctgcaggccgccgact |
| | | tcgacgagaacggcctgatcaagtccctgcccaacaccccctggcagctgcgggccgccgccctggaccgga |
| | | agctgacccccctggagtggtccgccgtgctgctgcacctgatcaagcaccggggctacctgtcccagcggaa |
| | | gaacgagggcgagaccgccgacaaggagctgggcgccctgctgaagggcgtggccaacaacgcccacgc |
| | | cctgcagaccggcgacttccggacccccgccgagctggccctgaacaagttcgagaaggagtccggccacat |
| | | ccggaaccagcggggcgactactcccacaccttctcccggaaggacctgcaggccgagctgatcctgctgttc |
| | | gagaagcagaaggagttcggcaacccccacgtgtccggcggcctgaaggagggcatcgagaccctgctgat |
| | | gacccagcggcccgccctgtccggcgacgccgtgcagaagatgctgggccactgcaccttcgagcccgccg |
| | | agcccaaggccgccaagaacacctacaccgccgagcggttcatctggctgaccaagctgaacaacctgcgga |
| | | tcctggagcagggctccgagcggcccctgaccgacaccgagcgggccaccctgatggacgagccctaccgg |
| | | aagtccaagctgacctacgcccaggcccggaagctgctgggcctggaggacaccgccttcttcaagggcctgc |
| | | ggtacggcaaggacaacgccgaggcctccaccctgatggagatgaaggcctaccacgccatctcccgggccc |
| | | tggagaaggagggcctgaaggacaagaagtcccccctgaacctgtcctccgagctgcaggacgagatcggca |
| | | ccgccttctccctgttcaagaccgacgaggacatcaccggccggctgaaggaccgggtgcagcccgagatcct |
| | | ggaggccctgctgaagcacatctccttcgacaagttcgtgcagatctccctgaaggccctgcggcggatcgtgc |
| | | ccctgatggagcagggcaagcggtacgacgaggcctgcgccgagatctacggcgaccactacggcaagaag |
| | | aacaccgaggagaagatctacctgccccccatccccgccgacgagatccggaaccccgtggtgctgcgggcc |
| | | ctgtcccaggcccggaaggtgatcaacggcgtggtgcggcggtacggctcccccgcccggatccacatcgag |
| | | accgcccgggaggtgggcaagtccttcaaggaccggaaggagatcgagaagcggcaggaggagaaccgg |
| | | aaggaccgggagaaggccgccgccaagttccgggagtacttccccaacttcgtggggagcccaagtccaag |
| | | gacatcctgaagctgcggctgtacgagcagcagcacggcaagtgcctgtactccggcaaggagatcaacctg |
| | | gtgcggctgaacgagaagggctacgtggagatcgaccacgccctgcccttctcccggacctgggacgactcct |
| | | tcaacaacaaggtgctggtgctgggctccgagaaccagaacaagggcaaccagaccccctacgagtacttcaa |
| | | cggcaaggacaactcccgggagtggcaggagttcaaggcccgggtggagacctcccggttcccccggtcca |
| | | agaagcagcggatcctgctgcagaagttcgacgaggacggcttcaaggagtgcaacctgaacgacacccggt |
| | | acgtgaaccggttcctgtgccagttcgtggccgaccacatcctgctgaccggcaagggcaagcggcgggtgtt |
| | | cgcctccaacggccagatcaccaacctgctgcggggcttctggggcctgcggaaggtgcgggccgagaacg |
| | | accggcaccacgccctggacgccgtggtggtggcctgctccaccgtggccatgcagcagaagatcacccggt |
| | | tcgtgcggtacaaggagatgaacgccttcgacggcaagaccatcgacaaggagaccggcaaggtgctgcacc |
| | | agaagacccacttcccccagccctgggagttcttcgcccaggaggtgatgatccgggtgttcggcaagcccga |
| | | cggcaagcccgagttcgaggaggccgacacccccgagaagctgcggaccctgctggccgagaagctgtcct |
| | | cccggcccgaggccgtgcacgagtacgtgacccccctgttcgtgtcccgggcccccaaccggaagatgtccg |
| | | gcgcccacaaggacaccctgcggtccgccaagcggttcgtgaagcacaacgagaagatctccgtgaagcgg |
| | | gtgtggctgaccgagatcaagctggccgacctggagaacatggtgaactacaagaacggccgggagatcgag |
| | | ctgtacgaggccctgaaggcccggctggaggcctacggcggcaacgccaagcaggccttcgaccccaagga |
| | | caaccccttctacaagaagggcggccagctggtgaaggccgtgcgggtggagaagacccaggagtccggcg |
| | | tgctgctgaacaagaagaacgcctacaccatcgccgacaacggcgacatggtgcgggtggacgtgttctgcaa |
| | | ggtggacaagaagggcaagaaccagtacttcatcgtgcccatctacgcctggcaggtggccgagaacatcctg |
| | | cccgacatcgactgcaagggctaccggatcgacgactcctacaccttctgcttctccctgcacaagtacgacctg |
| | | atcgccttccagaaggacgagaagtccaaggtggagttcgcctactacatcaactgcgactcctccaacggccg |
| | | gttctacctggcctggcacgacaagggctccaaggagcagcagttccggatctccacccagaacctggtgctg |
| | | atccagaagtaccaggtgaacgagctgggcaaggagatccggccctgccggctgaagaagcggccccccgt |
| | | gcggtagctagcaccagcctcaagaacacccgaatggagtctctaagctacataataccaacttacactttacaa |
| | | aatgttgtcccccaaaatgtagccattcgtatctgctcctaataaaaagaaagtttcttcacattctctcgagAAA |
| | | AAAAAAAAATGGAAAAAAAAAAAACGGAAAAAAAAAAAAGGTAA |
| | | AAAAAAAAAATATAAAAAAAAAAAACATAAAAAAAAAAAACGAA |
| | | AAAAAAAAAACGTAAAAAAAAAAAACTCAAAAAAAAAAAGATAA |
| | | AAAAAAAAAACCTAAAAAAAAAAAATGTAAAAAAAAAAAAGGGA |
| | | AAAAAAAAAAACGCAAAAAAAAAAAACACAAAAAAAAAAAATGC |
| | | AAAAAAAAAAAATCGAAAAAAAAAAAATCTAAAAAAAAAAAACG |
| | | AAAAAAAAAAAACCCAAAAAAAAAAAAGACAAAAAAAAAAAATA |
| | | GAAAAAAAAAAAGTTAAAAAAAAAAAACTGAAAAAAAAAAAATTT |
| | | AAAAAAAAAAAAT |
| 174 | mRNA M | GGGAAGCUCAGAAUAAACGCUCAACUUUGGCCGGAUCUGCCACCA |
| | encoding | UGGACGGCUCCGGCGGCGGCUCCCCCAAGAAGAAGCGGAAGGUGG |
| | Nme2Cas9 with | GCGGCUCCGGCGGCGGCGCCGCCUUCAAGCCCAACCCCAUCAACU |
| | HiBiT tag | ACAUCCUGGGCCUGGACAUCGGCAUCGCCUCCGUGGGCUGGGCCA |
| | | UGGUGGAGAUCGACGAGGAGGAGAACCCCAUCCGGCUGAUCGAC |
| | | CUGGGCGUGCGGGUGUUCGAGCGGGCCGAGGUGCCCAAGACCGGC |
| | | GACUCCCUGGCCAUGGCCCGGCGGCUGGCCCGGUCCGUGCGGCGG |
| | | CUGACCCGGCGGCGGGCCCACCGGCUGCUGCGGGCCCGGCGGCUG |
| | | CUGAAGCGGGAGGGCGUGCUGCAGGCCGCCGACUUCGACGAGAAC |
| | | GGCCUGAUCAAGUCCCUGCCCAACACCCCCUGGCAGCUGCGGGCC |
| | | GCCGCCCUGGACCGGAAGCUGACCCCCCUGGAGUGGUCCGCCGUG |
| | | CUGCUGCACCUGAUCAAGCACCGGGGCUACCUGUCCCAGCGGAAG |
| | | AACGAGGGCGAGACCGCCGACAAGGAGCUGGGCGCCCUGCUGAAG |
| | | GGCGUGGCCAACAACGCCCACGCCCUGCAGACCGGCGACUUCCGG |
| | | ACCCCCGCCGAGCUGGCCCUGAACAAGUUCGAGAAGGAGUCCGGC |
| | | CACAUCCGGAACCAGCGGGGCGACUACUCCCACACCUUCUCCCGG |
| | | AAGGACCUGCAGGCCGAGCUGAUCCUGCUGUUCGAGAAGCAGAA |
| | | GGAGUUCGGCAACCCCCACGUGUCCGGCGGCCUGAAGGAGGGCAU |
| | | CGAGACCCUGCUGAUGACCCAGCGGCCCGCCCUGUCCGGCGACGC |
| | | CGUGCAGAAGAUGCUGGGCCACUGCACCUUCGAGCCCGCCGAGCC |
| | | CAAGGCCGCCAAGAACACCUACACCGCCGAGCGGUUCAUCUGGCU |
| | | GACCAAGCUGAACAACCUGCGGAUCCUGGAGCAGGGCUCCGAGCG |
| | | GCCCCUGACCGACACCGAGCGGGCCACCCUGAUGGACGAGCCCUA |
| | | CCGGAAGUCCAAGCUGACCUACGCCCAGGCCCGGAAGCUGCUGGG |
| | | CCUGGAGGACACCGCCUUCUUCAAGGGCCUGCGGUACGGCAAGGA |
| | | CAACGCCGAGGCCUCCACCCUGAUGGAGAUGAAGGCCUACCACGC |
| | | CAUCUCCCGGGCCCUGGAGAAGGAGGGCCUGAAGGACAAGAAGU |
| | | CCCCCCUGAACCUGUCCUCCGAGCUGCAGGACGAGAUCGGCACCG |
| | | CCUUCUCCCUGUUCAAGACCGACGAGGACAUCACCGGCCGGCUGA |
| | | AGGACCGGGUGCAGCCCGAGAUCCUGGAGGCCCUGCUGAAGCACA |
| | | UCUCCUUCGACAAGUUCGUGCAGAUCUCCCUGAAGGCCCUGCGGC |
| | | GGAUCGUGCCCCUGAUGGAGCAGGGCAAGCGGUACGACGAGGCC |
| | | UGCGCCGAGAUCUACGGCGACCACUACGGCAAGAAGAACACCGAG |
| | | GAGAAGAUCUACCUGCCCCCCAUCCCCGCCGACGAGAUCCGGAAC |
| | | CCCGUGGUGCUGCGGGCCCUGUCCCAGGCCCGGAAGGUGAUCAAC |
| | | GGCGUGGUGCGGCGGUACGGCUCCCCCGCCCGGAUCCACAUCGAG |
| | | ACCGCCCGGGAGGUGGGCAAGUCCUUCAAGGACCGGAAGGAGAU |
| | | CGAGAAGCGGCAGGAGGAGAACCGGAAGGACCGGGAGAAGGCCG |
| | | CCGCCAAGUUCCGGGAGUACUUCCCCAACUUCGUGGGCGAGCCCA |
| | | AGUCCAAGGACAUCCUGAAGCUGCGGCUGUACGAGCAGCAGCACG |
| | | GCAAGUGCCUGUACUCCGGCAAGGAGAUCAACCUGGUGCGGCUG |
| | | AACGAGAAGGGCUACGUGGAGAUCGACCACGCCCUGCCCUUCUCC |
| | | CGGACCUGGGACGACUCCUUCAACAACAAGGUGCUGGUGCUGGGC |
| | | UCCGAGAACCAGAACAAGGGCAACCAGACCCCCUACGAGUACUUC |
| | | AACGGCAAGGACAACUCCCGGGAGUGGCAGGAGUUCAAGGCCCG |
| | | GGUGGAGACCUCCCGGUUCCCCCGGUCCAAGAAGCAGCGGAUCCU |
| | | GCUGCAGAAGUUCGACGAGGACGGCUUCAAGGAGUGCAACCUGA |
| | | ACGACACCCGGUACGUGAACCGGUUCCUGUGCCAGUUCGUGGCCG |
| | | ACCACAUCCUGCUGACCGGCAAGGGCAAGCGGCGGGUGUUCGCCU |
| | | CCAACGGCCAGAUCACCAACCUGCUGCGGGGCUUCUGGGGCCUGC |
| | | GGAAGGUGCGGGCCGAGAACGACCGGCACCACGCCCUGGACGCCG |
| | | UGGUGGUGGCCUGCUCCACCGUGGCCAUGCAGCAGAAGAUCACCC |
| | | GGUUCGUGCGGUACAAGGAGAUGAACGCCUUCGACGGCAAGACC |
| | | AUCGACAAGGAGACCGGCAAGGUGCUGCACCAGAAGACCCACUUC |
| | | CCCCAGCCCUGGGAGUUCUUCGCCCAGGAGGUGAUGAUCCGGGUG |
| | | UUCGGCAAGCCCGACGGCAAGCCCGAGUUCGAGGAGGCCGACACC |
| | | CCCGAGAAGCUGCGGACCCUGCUGGCCGAGAAGCUGUCCUCCCGG |
| | | CCCGAGGCCGUGCACGAGUACGUGACCCCCCUGUUCGUGUCCCGG |
| | | GCCCCCAACCGGAAGAUGUCCGGCGCCCACAAGGACACCCUGCGG |
| | | UCCGCCAAGCGGUUCGUGAAGCACAACGAGAAGAUCUCCGUGAA |
| | | GCGGGUGUGGCUGACCGAGAUCAAGCUGGCCGACCUGGAGAACA |
| | | UGGUGAACUACAAGAACGGCCGGGAGAUCGAGCUGUACGAGGCC |
| | | CUGAAGGCCCGGCUGGAGGCCUACGGCGGCAACGCCAAGCAGGCC |
| | | UUCGACCCCAAGGACAACCCCUUCUACAAGAAGGGCGGCCAGCUG |
| | | GUGAAGGCCGUGCGGGUGGAGAAGACCCAGGAGUCCGGCGUGCU |
| | | GCUGAACAAGAAGAACGCCUACACCAUCGCCGACAACGGCGACAU |
| | | GGUGCGGGUGGACGUGUUCUGCAAGGUGGACAAGAAGGGCAAGA |
| | | ACCAGUACUUCAUCGUGCCCAUCUACGCCUGGCAGGUGGCCGAGA |
| | | ACAUCCUGCCCGACAUCGACUGCAAGGGCUACCGGAUCGACGACU |
| | | CCUACACCUUCUGCUUCUCCCUGCACAAGUACGACCUGAUCGCCU |
| | | UCCAGAAGGACGAGAAGUCCAAGGUGGAGUUCGCCUACUACAUC |
| | | AACUGCGACUCCUCCAACGGCCGGUUCUACCUGGCCUGGCACGAC |
| | | AAGGGCUCCAAGGAGCAGCAGUUCCGGAUCUCCACCCAGAACCUG |
| | | GUGCUGAUCCAGAAGUACCAGGUGAACGAGCUGGGCAAGGAGAU |
| | | CCGGCCCUGCCGGCUGAAGAAGCGGCCCCCCGUGCGGUCCGAGUC |
| | | CGCCACCCCCGAGUCCGUGUCCGGCUGGCGGCUGUUCAAGAAGAU |
| | | CUCCUAGCUAGCACCAGCCUCAAGAACACCCGAAUGGAGUCUCUA |
| | | AGCUACAUAAUACCAACUUACACUUUACAAAAUGUUGUCCCCCAA |
| | | AAUGUAGCCAUUCGUAUCUGCUCCUAAUAAAAAGAAAGUUUCUU |
| | | CACAUUCUCUCGAGAAAAAAAAAAAAUGGAAAAAAAAAAAACGG |
| | | AAAAAAAAAAAAGGUAAAAAAAAAAAAUAUAAAAAAAAAAAACA |
| | | UAAAAAAAAAAAACGAAAAAAAAAAAACGUAAAAAAAAAAAACU |
| | | CAAAAAAAAAAAAGAUAAAAAAAAAAAACCUAAAAAAAAAAAAU |
| | | GUAAAAAAAAAAAAGGGAAAAAAAAAAAACGCAAAAAAAAAAAA |
| | | CACAAAAAAAAAAAAUGCAAAAAAAAAAAAUCGAAAAAAAAAAA |
| | | AUCUAAAAAAAAAAAACGAAAAAAAAAAAACCCAAAAAAAAAAA |
| | | AGACAAAAAAAAAAAAUAGAAAAAAAAAAAAGUUAAAAAAAAAA |
| | | AACUGAAAAAAAAAAAAUUUAAAAAAAAAAAAUCUAG |
| 175 | mRNA N | GGGAAGCUCAGAAUAAACGCUCAACUUUGGCCGGAUCUGCCACCA |
| | encoding | UGGACGGCUCCGGCGGCGGCUCCCCCAAGAAGAAGCGGAAGGUGG |
| | Nme2Cas9 | GCGGCUCCGGCGGCGGCGCCGCCUUCAAGCCCAACCCCAUCAACU |
| | | ACAUCCUGGGCCUGGACAUCGGCAUCGCCUCCGUGGGCUGGGCCA |
| | | UGGUGGAGAUCGACGAGGAGGAGAACCCCAUCCGGCUGAUCGAC |
| | | CUGGGCGUGCGGGUGUUCGAGCGGGCCGAGGUGCCCAAGACCGGC |
| | | GACUCCCUGGCCAUGGCCCGGCGGCUGGCCCGGUCCGUGCGGCGG |
| | | CUGACCCGGCGGCGGGCCCACCGGCUGCUGCGGGCCCGGCGGCUG |
| | | CUGAAGCGGGAGGGCGUGCUGCAGGCCGCCGACUUCGACGAGAAC |
| | | GGCCUGAUCAAGUCCCUGCCCAACACCCCCUGGCAGCUGCGGGCC |
| | | GCCGCCCUGGACCGGAAGCUGACCCCCCUGGAGUGGUCCGCCGUG |
| | | CUGCUGCACCUGAUCAAGCACCGGGGCUACCUGUCCCAGCGGAAG |
| | | AACGAGGGCGAGACCGCCGACAAGGAGCUGGGCGCCCUGCUGAAG |
| | | GGCGUGGCCAACAACGCCCACGCCCUGCAGACCGGCGACUUCCGG |
| | | ACCCCCGCCGAGCUGGCCCUGAACAAGUUCGAGAAGGAGUCCGGC |
| | | CACAUCCGGAACCAGCGGGGCGACUACUCCCACACCUUCUCCCGG |
| | | AAGGACCUGCAGGCCGAGCUGAUCCUGCUGUUCGAGAAGCAGAA |
| | | GGAGUUCGGCAACCCCCACGUGUCCGGCGGCCUGAAGGAGGGCAU |
| | | CGAGACCCUGCUGAUGACCCAGCGGCCCGCCCUGUCCGGCGACGC |
| | | CGUGCAGAAGAUGCUGGGCCACUGCACCUUCGAGCCCGCCGAGCC |
| | | CAAGGCCGCCAAGAACACCUACACCGCCGAGCGGUUCAUCUGGCU |
| | | GACCAAGCUGAACAACCUGCGGAUCCUGGAGCAGGGCUCCGAGCG |
| | | GCCCCUGACCGACACCGAGCGGGCCACCCUGAUGGACGAGCCCUA |
| | | CCGGAAGUCCAAGCUGACCUACGCCCAGGCCCGGAAGCUGCUGGG |
| | | CCUGGAGGACACCGCCUUCUUCAAGGGCCUGCGGUACGGCAAGGA |
| | | CAACGCCGAGGCCUCCACCCUGAUGGAGAUGAAGGCCUACCACGC |
| | | CAUCUCCCGGGCCCUGGAGAAGGAGGGCCUGAAGGACAAGAAGU |
| | | CCCCCCUGAACCUGUCCUCCGAGCUGCAGGACGAGAUCGGCACCG |
| | | CCUUCUCCCUGUUCAAGACCGACGAGGACAUCACCGGCCGGCUGA |
| | | AGGACCGGGUGCAGCCCGAGAUCCUGGAGGCCCUGCUGAAGCACA |
| | | UCUCCUUCGACAAGUUCGUGCAGAUCUCCCUGAAGGCCCUGCGGC |
| | | GGAUCGUGCCCCUGAUGGAGCAGGGCAAGCGGUACGACGAGGCC |
| | | UGCGCCGAGAUCUACGGCGACCACUACGGCAAGAAGAACACCGAG |
| | | GAGAAGAUCUACCUGCCCCCCAUCCCCGCCGACGAGAUCCGGAAC |
| | | CCCGUGGUGCUGCGGGCCCUGUCCCAGGCCCGGAAGGUGAUCAAC |
| | | GGCGUGGUGCGGCGGUACGGCUCCCCCGCCCGGAUCCACAUCGAG |
| | | ACCGCCCGGGAGGUGGGCAAGUCCUUCAAGGACCGGAAGGAGAU |
| | | CGAGAAGCGGCAGGAGGAGAACCGGAAGGACCGGGAGAAGGCCG |
| | | CCGCCAAGUUCCGGGAGUACUUCCCCAACUUCGUGGGCGAGCCCA |
| | | AGUCCAAGGACAUCCUGAAGCUGCGGCUGUACGAGCAGCAGCACG |
| | | GCAAGUGCCUGUACUCCGGCAAGGAGAUCAACCUGGUGCGGCUG |
| | | AACGAGAAGGGCUACGUGGAGAUCGACCACGCCCUGCCCUUCUCC |
| | | CGGACCUGGGACGACUCCUUCAACAACAAGGUGCUGGUGCUGGGC |
| | | UCCGAGAACCAGAACAAGGGCAACCAGACCCCCUACGAGUACUUC |
| | | AACGGCAAGGACAACUCCCGGGAGUGGCAGGAGUUCAAGGCCCG |
| | | GGUGGAGACCUCCCGGUUCCCCCGGUCCAAGAAGCAGCGGAUCCU |
| | | GCUGCAGAAGUUCGACGAGGACGGCUUCAAGGAGUGCAACCUGA |
| | | ACGACACCCGGUACGUGAACCGGUUCCUGUGCCAGUUCGUGGCCG |
| | | ACCACAUCCUGCUGACCGGCAAGGGCAAGCGGCGGGUGUUCGCCU |
| | | CCAACGGCCAGAUCACCAACCUGCUGCGGGGCUUCUGGGGCCUGC |
| | | GGAAGGUGCGGGCCGAGAACGACCGGCACCACGCCCUGGACGCCG |
| | | UGGUGGUGGCCUGCUCCACCGUGGCCAUGCAGCAGAAGAUCACCC |
| | | GGUUCGUGCGGUACAAGGAGAUGAACGCCUUCGACGGCAAGACC |
| | | AUCGACAAGGAGACCGGCAAGGUGCUGCACCAGAAGACCCACUUC |
| | | CCCCAGCCCUGGGAGUUCUUCGCCCAGGAGGUGAUGAUCCGGGUG |
| | | UUCGGCAAGCCCGACGGCAAGCCCGAGUUCGAGGAGGCCGACACC |
| | | CCCGAGAAGCUGCGGACCCUGCUGGCCGAGAAGCUGUCCUCCCGG |
| | | CCCGAGGCCGUGCACGAGUACGUGACCCCCCUGUUCGUGUCCCGG |
| | | GCCCCCAACCGGAAGAUGUCCGGCGCCCACAAGGACACCCUGCGG |
| | | UCCGCCAAGCGGUUCGUGAAGCACAACGAGAAGAUCUCCGUGAA |
| | | GCGGGUGUGGCUGACCGAGAUCAAGCUGGCCGACCUGGAGAACA |
| | | UGGUGAACUACAAGAACGGCCGGGAGAUCGAGCUGUACGAGGCC |
| | | CUGAAGGCCCGGCUGGAGGCCUACGGCGGCAACGCCAAGCAGGCC |
| | | UUCGACCCCAAGGACAACCCCUUCUACAAGAAGGGCGGCCAGCUG |
| | | GUGAAGGCCGUGCGGGUGGAGAAGACCCAGGAGUCCGGCGUGCU |
| | | GCUGAACAAGAAGAACGCCUACACCAUCGCCGACAACGGCGACAU |
| | | GGUGCGGGUGGACGUGUUCUGCAAGGUGGACAAGAAGGGCAAGA |
| | | ACCAGUACUUCAUCGUGCCCAUCUACGCCUGGCAGGUGGCCGAGA |
| | | ACAUCCUGCCCGACAUCGACUGCAAGGGCUACCGGAUCGACGACU |
| | | CCUACACCUUCUGCUUCUCCCUGCACAAGUACGACCUGAUCGCCU |
| | | UCCAGAAGGACGAGAAGUCCAAGGUGGAGUUCGCCUACUACAUC |
| | | AACUGCGACUCCUCCAACGGCCGGUUCUACCUGGCCUGGCACGAC |
| | | AAGGGCUCCAAGGAGCAGCAGUUCCGGAUCUCCACCCAGAACCUG |
| | | GUGCUGAUCCAGAAGUACCAGGUGAACGAGCUGGGCAAGGAGAU |
| | | CCGGCCCUGCCGGCUGAAGAAGCGGCCCCCCGUGCGGUCCGGAAA |
| | | GCGGACCGCCGACGGCUCCGGAGGAGGAAGCCCCGCCGCCAAGAA |
| | | GAAGAAGCUGGACUAGCUAGCACCAGCCUCAAGAACACCCGAAUG |
| | | GAGUCUCUAAGCUACAUAAUACCAACUUACACUUUACAAAAUGU |
| | | UGUCCCCCAAAAUGUAGCCAUUCGUAUCUGCUCCUAAUAAAAAG |
| | | AAAGUUUCUUCACAUUCUCUCGAGAAAAAAAAAAAAUGGAAAAA |
| | | AAAAAAACGGAAAAAAAAAAAAGGUAAAAAAAAAAAAUAUAAAA |
| | | AAAAAAAACAUAAAAAAAAAAAACGAAAAAAAAAAAACGUAAAA |
| | | AAAAAAAACUCAAAAAAAAAAAGAUAAAAAAAAAAAACCUAAAA |
| | | AAAAAAAAUGUAAAAAAAAAAAAGGGAAAAAAAAAAAACGCAAA |
| | | AAAAAAAAACACAAAAAAAAAAAAUGCAAAAAAAAAAAAUCGAA |
| | | AAAAAAAAAAUCUAAAAAAAAAAAACGAAAAAAAAAAAACCCAA |
| | | AAAAAAAAAAGACAAAAAAAAAAAAUAGAAAAAAAAAAAGUUAA |
| | | AAAAAAAAAACUGAAAAAAAAAAAAUUUAAAAAAAAAAAAUCUA |
| | | G |
| 176 | mRNA O | GGGAAGCUCAGAAUAAACGCUCAACUUUGGCCGGAUCUGCCACCA |
| | encoding | UGGACGGCUCCGGCGGCGGCUCCCCCAAGAAGAAGCGGAAGGUGG |
| | Nme2Cas9 | AGGACAAGCGGCCCGCCGCCACCAAGAAGGCCGGCCAGGCCAAGA |
| | | AGAAGAAGGGCGGCUCCGGCGGCGGCGCCGCCUUCAAGCCCAACC |
| | | CCAUCAACUACAUCCUGGGCCUGGACAUCGGCAUCGCCUCCGUGG |
| | | GCUGGGCCAUGGUGGAGAUCGACGAGGAGGAGAACCCCAUCCGG |
| | | CUGAUCGACCUGGGCGUGCGGGUGUUCGAGCGGGCCGAGGUGCCC |
| | | AAGACCGGCGACUCCCUGGCCAUGGCCCGGCGGCUGGCCCGGUCC |
| | | GUGCGGCGGCUGACCCGGCGGCGGGCCCACCGGCUGCUGCGGGCC |
| | | CGGCGGCUGCUGAAGCGGGAGGGCGUGCUGCAGGCCGCCGACUUC |
| | | GACGAGAACGGCCUGAUCAAGUCCCUGCCCAACACCCCCUGGCAG |
| | | CUGCGGGCCGCCGCCCUGGACCGGAAGCUGACCCCCCUGGAGUGG |
| | | UCCGCCGUGCUGCUGCACCUGAUCAAGCACCGGGGCUACCUGUCC |
| | | CAGCGGAAGAACGAGGGCGAGACCGCCGACAAGGAGCUGGGCGCC |
| | | CUGCUGAAGGGCGUGGCCAACAACGCCCACGCCCUGCAGACCGGC |
| | | GACUUCCGGACCCCCGCCGAGCUGGCCCUGAACAAGUUCGAGAAG |
| | | GAGUCCGGCCACAUCCGGAACCAGCGGGGCGACUACUCCCACACC |
| | | UUCUCCCGGAAGGACCUGCAGGCCGAGCUGAUCCUGCUGUUCGAG |
| | | AAGCAGAAGGAGUUCGGCAACCCCCACGUGUCCGGCGGCCUGAAG |
| | | GAGGGCAUCGAGACCCUGCUGAUGACCCAGCGGCCCGCCCUGUCC |
| | | GGCGACGCCGUGCAGAAGAUGCUGGGCCACUGCACCUUCGAGCCC |
| | | GCCGAGCCCAAGGCCGCCAAGAACACCUACACCGCCGAGCGGUUC |
| | | AUCUGGCUGACCAAGCUGAACAACCUGCGGAUCCUGGAGCAGGGC |
| | | UCCGAGCGGCCCCUGACCGACACCGAGCGGGCCACCCUGAUGGAC |
| | | GAGCCCUACCGGAAGUCCAAGCUGACCUACGCCCAGGCCCGGAAG |
| | | CUGCUGGGCCUGGAGGACACCGCCUUCUUCAAGGGCCUGCGGUAC |
| | | GGCAAGGACAACGCCGAGGCCUCCACCCUGAUGGAGAUGAAGGCC |
| | | UACCACGCCAUCUCCCGGGCCCUGGAGAAGGAGGGCCUGAAGGAC |
| | | AAGAAGUCCCCCCUGAACCUGUCCUCCGAGCUGCAGGACGAGAUC |
| | | GGCACCGCCUUCUCCCUGUUCAAGACCGACGAGGACAUCACCGGC |
| | | CGGCUGAAGGACCGGGUGCAGCCCGAGAUCCUGGAGGCCCUGCUG |
| | | AAGCACAUCUCCUUCGACAAGUUCGUGCAGAUCUCCCUGAAGGCC |
| | | CUGCGGCGGAUCGUGCCCCUGAUGGAGCAGGGCAAGCGGUACGAC |
| | | GAGGCCUGCGCCGAGAUCUACGGCGACCACUACGGCAAGAAGAAC |
| | | ACCGAGGAGAAGAUCUACCUGCCCCCCAUCCCCGCCGACGAGAUC |
| | | CGGAACCCCGUGGUGCUGCGGGCCCUGUCCCAGGCCCGGAAGGUG |
| | | AUCAACGGCGUGGUGCGGCGGUACGGCUCCCCCGCCCGGAUCCAC |
| | | AUCGAGACCGCCCGGGAGGUGGGCAAGUCCUUCAAGGACCGGAA |
| | | GGAGAUCGAGAAGCGGCAGGAGGAGAACCGGAAGGACCGGGAGA |
| | | AGGCCGCCGCCAAGUUCCGGGAGUACUUCCCCAACUUCGUGGGCG |
| | | AGCCCAAGUCCAAGGACAUCCUGAAGCUGCGGCUGUACGAGCAGC |
| | | AGCACGGCAAGUGCCUGUACUCCGGCAAGGAGAUCAACCUGGUGC |
| | | GGCUGAACGAGAAGGGCUACGUGGAGAUCGACCACGCCCUGCCCU |
| | | UCUCCCGGACCUGGGACGACUCCUUCAACAACAAGGUGCUGGUGC |
| | | UGGGCUCCGAGAACCAGAACAAGGGCAACCAGACCCCCUACGAGU |
| | | ACUUCAACGGCAAGGACAACUCCCGGGAGUGGCAGGAGUUCAAG |
| | | GCCCGGGUGGAGACCUCCCGGUUCCCCCGGUCCAAGAAGCAGCGG |
| | | AUCCUGCUGCAGAAGUUCGACGAGGACGGCUUCAAGGAGUGCAA |
| | | CCUGAACGACACCCGGUACGUGAACCGGUUCCUGUGCCAGUUCGU |
| | | GGCCGACCACAUCCUGCUGACCGGCAAGGGCAAGCGGCGGGUGUU |
| | | CGCCUCCAACGGCCAGAUCACCAACCUGCUGCGGGGCUUCUGGGG |
| | | CCUGCGGAAGGUGCGGGCCGAGAACGACCGGCACCACGCCCUGGA |
| | | CGCCGUGGUGGUGGCCUGCUCCACCGUGGCCAUGCAGCAGAAGAU |
| | | CACCCGGUUCGUGCGGUACAAGGAGAUGAACGCCUUCGACGGCAA |
| | | GACCAUCGACAAGGAGACCGGCAAGGUGCUGCACCAGAAGACCCA |
| | | CUUCCCCCAGCCCUGGGAGUUCUUCGCCCAGGAGGUGAUGAUCCG |
| | | GGUGUUCGGCAAGCCCGACGGCAAGCCCGAGUUCGAGGAGGCCGA |
| | | CACCCCCGAGAAGCUGCGGACCCUGCUGGCCGAGAAGCUGUCCUC |
| | | CCGGCCCGAGGCCGUGCACGAGUACGUGACCCCCCUGUUCGUGUC |
| | | CCGGGCCCCCAACCGGAAGAUGUCCGGCGCCCACAAGGACACCCU |
| | | GCGGUCCGCCAAGCGGUUCGUGAAGCACAACGAGAAGAUCUCCGU |
| | | GAAGCGGGUGUGGCUGACCGAGAUCAAGCUGGCCGACCUGGAGA |
| | | ACAUGGUGAACUACAAGAACGGCCGGGAGAUCGAGCUGUACGAG |
| | | GCCCUGAAGGCCCGGCUGGAGGCCUACGGCGGCAACGCCAAGCAG |
| | | GCCUUCGACCCCAAGGACAACCCCUUCUACAAGAAGGGCGGCCAG |
| | | CUGGUGAAGGCCGUGCGGGUGGAGAAGACCCAGGAGUCCGGCGU |
| | | GCUGCUGAACAAGAAGAACGCCUACACCAUCGCCGACAACGGCGA |
| | | CAUGGUGCGGGUGGACGUGUUCUGCAAGGUGGACAAGAAGGGCA |
| | | AGAACCAGUACUUCAUCGUGCCCAUCUACGCCUGGCAGGUGGCCG |
| | | AGAACAUCCUGCCCGACAUCGACUGCAAGGGCUACCGGAUCGACG |
| | | ACUCCUACACCUUCUGCUUCUCCCUGCACAAGUACGACCUGAUCG |
| | | CCUUCCAGAAGGACGAGAAGUCCAAGGUGGAGUUCGCCUACUAC |
| | | AUCAACUGCGACUCCUCCAACGGCCGGUUCUACCUGGCCUGGCAC |
| | | GACAAGGGCUCCAAGGAGCAGCAGUUCCGGAUCUCCACCCAGAAC |
| | | CUGGUGCUGAUCCAGAAGUACCAGGUGAACGAGCUGGGCAAGGA |
| | | GAUCCGGCCCUGCCGGCUGAAGAAGCGGCCCCCCGUGCGGUAGCU |
| | | AGCACCAGCCUCAAGAACACCCGAAUGGAGUCUCUAAGCUACAUA |
| | | AUACCAACUUACACUUUACAAAAUGUUGUCCCCCAAAAUGUAGCC |
| | | AUUCGUAUCUGCUCCUAAUAAAAAGAAAGUUUCUUCACAUUCUC |
| | | UCGAGAAAAAAAAAAAAUGGAAAAAAAAAAAACGGAAAAAAAAA |
| | | AAAGGUAAAAAAAAAAAAUAUAAAAAAAAAAAACAUAAAAAAAA |
| | | AAAACGAAAAAAAAAAAACGUAAAAAAAAAAAACUCAAAAAAAA |
| | | AAAGAUAAAAAAAAAAAACCUAAAAAAAAAAAAUGUAAAAAAAA |
| | | AAAAGGGAAAAAAAAAAAACGCAAAAAAAAAAAACACAAAAAAA |
| | | AAAAAUGCAAAAAAAAAAAAUCGAAAAAAAAAAAAUCUAAAAAA |
| | | AAAAAACGAAAAAAAAAAAACCCAAAAAAAAAAAAGACAAAAAA |
| | | AAAAAAUAGAAAAAAAAAAAGUUAAAAAAAAAAAACUGAAAAAA |
| | | AAAAAAUUUAAAAAAAAAAAAUCUAG |
| 177 | mRNA P | GGGAAGCUCAGAAUAAACGCUCAACUUUGGCCGGAUCUGCCACCA |
| | encoding | UGGACGGCUCCGGCGGCGGCUCCCCCAAGAAGAAGCGGAAGGUGG |
| | Nme2Cas9 with | AGGACAAGCGGCCCGCCGCCACCAAGAAGGCCGGCCAGGCCAAGA |
| | HiBiT tag | AGAAGAAGGGCGGCUCCGGCGGCGGCGCCGCCUUCAAGCCCAACC |
| | | CCAUCAACUACAUCCUGGGCCUGGACAUCGGCAUCGCCUCCGUGG |
| | | GCUGGGCCAUGGUGGAGAUCGACGAGGAGGAGAACCCCAUCCGG |
| | | CUGAUCGACCUGGGCGUGCGGGUGUUCGAGCGGGCCGAGGUGCCC |
| | | AAGACCGGCGACUCCCUGGCCAUGGCCCGGCGGCUGGCCCGGUCC |
| | | GUGCGGCGGCUGACCCGGCGGCGGGCCCACCGGCUGCUGCGGGCC |
| | | CGGCGGCUGCUGAAGCGGGAGGGCGUGCUGCAGGCCGCCGACUUC |
| | | GACGAGAACGGCCUGAUCAAGUCCCUGCCCAACACCCCCUGGCAG |
| | | CUGCGGGCCGCCGCCCUGGACCGGAAGCUGACCCCCCUGGAGUGG |
| | | UCCGCCGUGCUGCUGCACCUGAUCAAGCACCGGGGCUACCUGUCC |
| | | CAGCGGAAGAACGAGGGCGAGACCGCCGACAAGGAGCUGGGCGCC |
| | | CUGCUGAAGGGCGUGGCCAACAACGCCCACGCCCUGCAGACCGGC |
| | | GACUUCCGGACCCCCGCCGAGCUGGCCCUGAACAAGUUCGAGAAG |
| | | GAGUCCGGCCACAUCCGGAACCAGCGGGGCGACUACUCCCACACC |
| | | UUCUCCCGGAAGGACCUGCAGGCCGAGCUGAUCCUGCUGUUCGAG |
| | | AAGCAGAAGGAGUUCGGCAACCCCCACGUGUCCGGCGGCCUGAAG |
| | | GAGGGCAUCGAGACCCUGCUGAUGACCCAGCGGCCCGCCCUGUCC |
| | | GGCGACGCCGUGCAGAAGAUGCUGGGCCACUGCACCUUCGAGCCC |
| | | GCCGAGCCCAAGGCCGCCAAGAACACCUACACCGCCGAGCGGUUC |
| | | AUCUGGCUGACCAAGCUGAACAACCUGCGGAUCCUGGAGCAGGGC |
| | | UCCGAGCGGCCCCUGACCGACACCGAGCGGGCCACCCUGAUGGAC |
| | | GAGCCCUACCGGAAGUCCAAGCUGACCUACGCCCAGGCCCGGAAG |
| | | CUGCUGGGCCUGGAGGACACCGCCUUCUUCAAGGGCCUGCGGUAC |
| | | GGCAAGGACAACGCCGAGGCCUCCACCCUGAUGGAGAUGAAGGCC |
| | | UACCACGCCAUCUCCCGGGCCCUGGAGAAGGAGGGCCUGAAGGAC |
| | | AAGAAGUCCCCCCUGAACCUGUCCUCCGAGCUGCAGGACGAGAUC |
| | | GGCACCGCCUUCUCCCUGUUCAAGACCGACGAGGACAUCACCGGC |
| | | CGGCUGAAGGACCGGGUGCAGCCCGAGAUCCUGGAGGCCCUGCUG |
| | | AAGCACAUCUCCUUCGACAAGUUCGUGCAGAUCUCCCUGAAGGCC |
| | | CUGCGGCGGAUCGUGCCCCUGAUGGAGCAGGGCAAGCGGUACGAC |
| | | GAGGCCUGCGCCGAGAUCUACGGCGACCACUACGGCAAGAAGAAC |
| | | ACCGAGGAGAAGAUCUACCUGCCCCCCAUCCCCGCCGACGAGAUC |
| | | CGGAACCCCGUGGUGCUGCGGGCCCUGUCCCAGGCCCGGAAGGUG |
| | | AUCAACGGCGUGGUGCGGCGGUACGGCUCCCCCGCCCGGAUCCAC |
| | | AUCGAGACCGCCCGGGAGGUGGGCAAGUCCUUCAAGGACCGGAA |
| | | GGAGAUCGAGAAGCGGCAGGAGGAGAACCGGAAGGACCGGGAGA |
| | | AGGCCGCCGCCAAGUUCCGGGAGUACUUCCCCAACUUCGUGGGCG |
| | | AGCCCAAGUCCAAGGACAUCCUGAAGCUGCGGCUGUACGAGCAGC |
| | | AGCACGGCAAGUGCCUGUACUCCGGCAAGGAGAUCAACCUGGUGC |
| | | GGCUGAACGAGAAGGGCUACGUGGAGAUCGACCACGCCCUGCCCU |
| | | UCUCCCGGACCUGGGACGACUCCUUCAACAACAAGGUGCUGGUGC |
| | | UGGGCUCCGAGAACCAGAACAAGGGCAACCAGACCCCCUACGAGU |
| | | ACUUCAACGGCAAGGACAACUCCCGGGAGUGGCAGGAGUUCAAG |
| | | GCCCGGGUGGAGACCUCCCGGUUCCCCCGGUCCAAGAAGCAGCGG |
| | | AUCCUGCUGCAGAAGUUCGACGAGGACGGCUUCAAGGAGUGCAA |
| | | CCUGAACGACACCCGGUACGUGAACCGGUUCCUGUGCCAGUUCGU |
| | | GGCCGACCACAUCCUGCUGACCGGCAAGGGCAAGCGGCGGGUGUU |
| | | CGCCUCCAACGGCCAGAUCACCAACCUGCUGCGGGGCUUCUGGGG |
| | | CCUGCGGAAGGUGCGGGCCGAGAACGACCGGCACCACGCCCUGGA |
| | | CGCCGUGGUGGUGGCCUGCUCCACCGUGGCCAUGCAGCAGAAGAU |
| | | CACCCGGUUCGUGCGGUACAAGGAGAUGAACGCCUUCGACGGCAA |
| | | GACCAUCGACAAGGAGACCGGCAAGGUGCUGCACCAGAAGACCCA |
| | | CUUCCCCCAGCCCUGGGAGUUCUUCGCCCAGGAGGUGAUGAUCCG |
| | | GGUGUUCGGCAAGCCCGACGGCAAGCCCGAGUUCGAGGAGGCCGA |
| | | CACCCCCGAGAAGCUGCGGACCCUGCUGGCCGAGAAGCUGUCCUC |
| | | CCGGCCCGAGGCCGUGCACGAGUACGUGACCCCCCUGUUCGUGUC |
| | | CCGGGCCCCCAACCGGAAGAUGUCCGGCGCCCACAAGGACACCCU |
| | | GCGGUCCGCCAAGCGGUUCGUGAAGCACAACGAGAAGAUCUCCGU |
| | | GAAGCGGGUGUGGCUGACCGAGAUCAAGCUGGCCGACCUGGAGA |
| | | ACAUGGUGAACUACAAGAACGGCCGGGAGAUCGAGCUGUACGAG |
| | | GCCCUGAAGGCCCGGCUGGAGGCCUACGGCGGCAACGCCAAGCAG |
| | | GCCUUCGACCCCAAGGACAACCCCUUCUACAAGAAGGGCGGCCAG |
| | | CUGGUGAAGGCCGUGCGGGUGGAGAAGACCCAGGAGUCCGGCGU |
| | | GCUGCUGAACAAGAAGAACGCCUACACCAUCGCCGACAACGGCGA |
| | | CAUGGUGCGGGUGGACGUGUUCUGCAAGGUGGACAAGAAGGGCA |
| | | AGAACCAGUACUUCAUCGUGCCCAUCUACGCCUGGCAGGUGGCCG |
| | | AGAACAUCCUGCCCGACAUCGACUGCAAGGGCUACCGGAUCGACG |
| | | ACUCCUACACCUUCUGCUUCUCCCUGCACAAGUACGACCUGAUCG |
| | | CCUUCCAGAAGGACGAGAAGUCCAAGGUGGAGUUCGCCUACUAC |
| | | AUCAACUGCGACUCCUCCAACGGCCGGUUCUACCUGGCCUGGCAC |
| | | GACAAGGGCUCCAAGGAGCAGCAGUUCCGGAUCUCCACCCAGAAC |
| | | CUGGUGCUGAUCCAGAAGUACCAGGUGAACGAGCUGGGCAAGGA |
| | | GAUCCGGCCCUGCCGGCUGAAGAAGCGGCCCCCCGUGCGGUCCGA |
| | | GUCCGCCACCCCCGAGUCCGUGUCCGGCUGGCGGCUGUUCAAGAA |
| | | GAUCUCCUAGCUAGCACCAGCCUCAAGAACACCCGAAUGGAGUCU |
| | | CUAAGCUACAUAAUACCAACUUACACUUUACAAAAUGUUGUCCCC |
| | | CAAAAUGUAGCCAUUCGUAUCUGCUCCUAAUAAAAAGAAAGUUU |
| | | CUUCACAUUCUCUCGAGAAAAAAAAAAAAUGGAAAAAAAAAAAA |
| | | CGGAAAAAAAAAAAAGGUAAAAAAAAAAAAUAUAAAAAAAAAAA |
| | | ACAUAAAAAAAAAAAACGAAAAAAAAAAAACGUAAAAAAAAAAA |
| | | ACUCAAAAAAAAAAAAGAUAAAAAAAAAAAACCUAAAAAAAAAA |
| | | AAUGUAAAAAAAAAAAAGGGAAAAAAAAAAAACGCAAAAAAAAA |
| | | AAACACAAAAAAAAAAAAUGCAAAAAAAAAAAAUCGAAAAAAAA |
| | | AAAAUCUAAAAAAAAAAAACGAAAAAAAAAAAACCCAAAAAAAA |
| | | AAAAGACAAAAAAAAAAAAUAGAAAAAAAAAAAAGUUAAAAAAA |
| | | AAAAACUGAAAAAAAAAAAAUUUAAAAAAAAAAAAUCUAG |
| 178 | mRNA Q | GGGAAGCUCAGAAUAAACGCUCAACUUUGGCCGGAUCUGCCACCA |
| | encoding | UGGACGGCUCCGGCGGCGGCUCCCCCAAGAAGAAGCGGAAGGUGG |
| | Nme2Cas9 | GCGGCUCCGGCGGCGGCGCCGCCUUCAAGCCCAACCCCAUCAACU |
| | | ACAUCCUGGGCCUGGACAUCGGCAUCGCCUCCGUGGGCUGGGCCA |
| | | UGGUGGAGAUCGACGAGGAGGAGAACCCCAUCCGGCUGAUCGAC |
| | | CUGGGCGUGCGGGUGUUCGAGCGGGCCGAGGUGCCCAAGACCGGC |
| | | GACUCCCUGGCCAUGGCCCGGCGGCUGGCCCGGUCCGUGCGGCGG |
| | | CUGACCCGGCGGCGGGCCCACCGGCUGCUGCGGGCCCGGCGGCUG |
| | | CUGAAGCGGGAGGGCGUGCUGCAGGCCGCCGACUUCGACGAGAAC |
| | | GGCCUGAUCAAGUCCCUGCCCAACACCCCCUGGCAGCUGCGGGCC |
| | | GCCGCCCUGGACCGGAAGCUGACCCCCCUGGAGUGGUCCGCCGUG |
| | | CUGCUGCACCUGAUCAAGCACCGGGGCUACCUGUCCCAGCGGAAG |
| | | AACGAGGGCGAGACCGCCGACAAGGAGCUGGGCGCCCUGCUGAAG |
| | | GGCGUGGCCAACAACGCCCACGCCCUGCAGACCGGCGACUUCCGG |
| | | ACCCCCGCCGAGCUGGCCCUGAACAAGUUCGAGAAGGAGUCCGGC |
| | | CACAUCCGGAACCAGCGGGGCGACUACUCCCACACCUUCUCCCGG |
| | | AAGGACCUGCAGGCCGAGCUGAUCCUGCUGUUCGAGAAGCAGAA |
| | | GGAGUUCGGCAACCCCCACGUGUCCGGCGGCCUGAAGGAGGGCAU |
| | | CGAGACCCUGCUGAUGACCCAGCGGCCCGCCCUGUCCGGCGACGC |
| | | CGUGCAGAAGAUGCUGGGCCACUGCACCUUCGAGCCCGCCGAGCC |
| | | CAAGGCCGCCAAGAACACCUACACCGCCGAGCGGUUCAUCUGGCU |
| | | GACCAAGCUGAACAACCUGCGGAUCCUGGAGCAGGGCUCCGAGCG |
| | | GCCCCUGACCGACACCGAGCGGGCCACCCUGAUGGACGAGCCCUA |
| | | CCGGAAGUCCAAGCUGACCUACGCCCAGGCCCGGAAGCUGCUGGG |
| | | CCUGGAGGACACCGCCUUCUUCAAGGGCCUGCGGUACGGCAAGGA |
| | | CAACGCCGAGGCCUCCACCCUGAUGGAGAUGAAGGCCUACCACGC |
| | | CAUCUCCCGGGCCCUGGAGAAGGAGGGCCUGAAGGACAAGAAGU |
| | | CCCCCCUGAACCUGUCCUCCGAGCUGCAGGACGAGAUCGGCACCG |
| | | CCUUCUCCCUGUUCAAGACCGACGAGGACAUCACCGGCCGGCUGA |
| | | AGGACCGGGUGCAGCCCGAGAUCCUGGAGGCCCUGCUGAAGCACA |
| | | UCUCCUUCGACAAGUUCGUGCAGAUCUCCCUGAAGGCCCUGCGGC |
| | | GGAUCGUGCCCCUGAUGGAGCAGGGCAAGCGGUACGACGAGGCC |
| | | UGCGCCGAGAUCUACGGCGACCACUACGGCAAGAAGAACACCGAG |
| | | GAGAAGAUCUACCUGCCCCCCAUCCCCGCCGACGAGAUCCGGAAC |
| | | CCCGUGGUGCUGCGGGCCCUGUCCCAGGCCCGGAAGGUGAUCAAC |
| | | GGCGUGGUGCGGCGGUACGGCUCCCCCGCCCGGAUCCACAUCGAG |
| | | ACCGCCCGGGAGGUGGGCAAGUCCUUCAAGGACCGGAAGGAGAU |
| | | CGAGAAGCGGCAGGAGGAGAACCGGAAGGACCGGGAGAAGGCCG |
| | | CCGCCAAGUUCCGGGAGUACUUCCCCAACUUCGUGGGCGAGCCCA |
| | | AGUCCAAGGACAUCCUGAAGCUGCGGCUGUACGAGCAGCAGCACG |
| | | GCAAGUGCCUGUACUCCGGCAAGGAGAUCAACCUGGUGCGGCUG |
| | | AACGAGAAGGGCUACGUGGAGAUCGACCACGCCCUGCCCUUCUCC |
| | | CGGACCUGGGACGACUCCUUCAACAACAAGGUGCUGGUGCUGGGC |
| | | UCCGAGAACCAGAACAAGGGCAACCAGACCCCCUACGAGUACUUC |
| | | AACGGCAAGGACAACUCCCGGGAGUGGCAGGAGUUCAAGGCCCG |
| | | GGUGGAGACCUCCCGGUUCCCCCGGUCCAAGAAGCAGCGGAUCCU |
| | | GCUGCAGAAGUUCGACGAGGACGGCUUCAAGGAGUGCAACCUGA |
| | | ACGACACCCGGUACGUGAACCGGUUCCUGUGCCAGUUCGUGGCCG |
| | | ACCACAUCCUGCUGACCGGCAAGGGCAAGCGGCGGGUGUUCGCCU |
| | | CCAACGGCCAGAUCACCAACCUGCUGCGGGGCUUCUGGGGCCUGC |
| | | GGAAGGUGCGGGCCGAGAACGACCGGCACCACGCCCUGGACGCCG |
| | | UGGUGGUGGCCUGCUCCACCGUGGCCAUGCAGCAGAAGAUCACCC |
| | | GGUUCGUGCGGUACAAGGAGAUGAACGCCUUCGACGGCAAGACC |
| | | AUCGACAAGGAGACCGGCAAGGUGCUGCACCAGAAGACCCACUUC |
| | | CCCCAGCCCUGGGAGUUCUUCGCCCAGGAGGUGAUGAUCCGGGUG |
| | | UUCGGCAAGCCCGACGGCAAGCCCGAGUUCGAGGAGGCCGACACC |
| | | CCCGAGAAGCUGCGGACCCUGCUGGCCGAGAAGCUGUCCUCCCGG |
| | | CCCGAGGCCGUGCACGAGUACGUGACCCCCCUGUUCGUGUCCCGG |
| | | GCCCCCAACCGGAAGAUGUCCGGCGCCCACAAGGACACCCUGCGG |
| | | UCCGCCAAGCGGUUCGUGAAGCACAACGAGAAGAUCUCCGUGAA |
| | | GCGGGUGUGGCUGACCGAGAUCAAGCUGGCCGACCUGGAGAACA |
| | | UGGUGAACUACAAGAACGGCCGGGAGAUCGAGCUGUACGAGGCC |
| | | CUGAAGGCCCGGCUGGAGGCCUACGGCGGCAACGCCAAGCAGGCC |
| | | UUCGACCCCAAGGACAACCCCUUCUACAAGAAGGGCGGCCAGCUG |
| | | GUGAAGGCCGUGCGGGUGGAGAAGACCCAGGAGUCCGGCGUGCU |
| | | GCUGAACAAGAAGAACGCCUACACCAUCGCCGACAACGGCGACAU |
| | | GGUGCGGGUGGACGUGUUCUGCAAGGUGGACAAGAAGGGCAAGA |
| | | ACCAGUACUUCAUCGUGCCCAUCUACGCCUGGCAGGUGGCCGAGA |
| | | ACAUCCUGCCCGACAUCGACUGCAAGGGCUACCGGAUCGACGACU |
| | | CCUACACCUUCUGCUUCUCCCUGCACAAGUACGACCUGAUCGCCU |
| | | UCCAGAAGGACGAGAAGUCCAAGGUGGAGUUCGCCUACUACAUC |
| | | AACUGCGACUCCUCCAACGGCCGGUUCUACCUGGCCUGGCACGAC |
| | | AAGGGCUCCAAGGAGCAGCAGUUCCGGAUCUCCACCCAGAACCUG |
| | | GUGCUGAUCCAGAAGUACCAGGUGAACGAGCUGGGCAAGGAGAU |
| | | CCGGCCCUGCCGGCUGAAGAAGCGGCCCCCCGUGCGGUAGCUAGC |
| | | ACCAGCCUCAAGAACACCCGAAUGGAGUCUCUAAGCUACAUAAUA |
| | | CCAACUUACACUUUACAAAAUGUUGUCCCCCAAAAUGUAGCCAUU |
| | | CGUAUCUGCUCCUAAUAAAAAGAAAGUUUCUUCACAUUCUCUCG |
| | | AGAAAAAAAAAAAAUGGAAAAAAAAAAAACGGAAAAAAAAAAAA |
| | | GGUAAAAAAAAAAAAUAUAAAAAAAAAAAACAUAAAAAAAAAAA |
| | | ACGAAAAAAAAAAAACGUAAAAAAAAAAAACUCAAAAAAAAAAA |
| | | GAUAAAAAAAAAAAACCUAAAAAAAAAAAAUGUAAAAAAAAAAA |
| | | AGGGAAAAAAAAAAAACGCAAAAAAAAAAAACACAAAAAAAAAA |
| | | AAUGCAAAAAAAAAAAAUCGAAAAAAAAAAAAUCUAAAAAAAAA |
| | | AAACGAAAAAAAAAAAACCCAAAAAAAAAAAAGACAAAAAAAAA |
| | | AAAUAGAAAAAAAAAAAGUUAAAAAAAAAAAACUGAAAAAAAAA |
| | | AAAUUUAAAAAAAAAAAAUCUAG |
| 179 | mRNA S | GGGAAGCUCAGAAUAAACGCUCAACUUUGGCCGGAUCUGCCACCA |
| | encoding | UGGACGGCUCCGGCGGCGGCUCCCCCAAGAAGAAGCGGAAGGUGG |
| | Nme2Cas9 base | AGGACAAGCGGCCCGCCGCCACCAAGAAGGCCGGCCAGGCCAAGA |
| | editor | AGAAGAAGGGCGGCUCCGGCGGCGGCGAGGCCUCCCCCGCCUCCG |
| | | GCCCCCGGCACCUGAUGGACCCCCACAUCUUCACCUCCAACUUCA |
| | | ACAACGGCAUCGGCCGGCACAAGACCUACCUGUGCUACGAGGUGG |
| | | AGCGGCUGGACAACGGCACCUCCGUGAAGAUGGACCAGCACCGGG |
| | | GCUUCCUGCACAACCAGGCCAAGAACCUGCUGUGCGGCUUCUACG |
| | | GCCGGCACGCCGAGCUGCGGUUCCUGGACCUGGUGCCCUCCCUGC |
| | | AGCUGGACCCCGCCCAGAUCUACCGGGUGACCUGGUUCAUCUCCU |
| | | GGUCCCCCUGCUUCUCCUGGGGCUGCGCCGGCGAGGUGCGGGCCU |
| | | UCCUGCAGGAGAACACCCACGUGCGGCUGCGGAUCUUCGCCGCCC |
| | | GGAUCUACGACUACGACCCCCUGUACAAGGAGGCCCUGCAGAUGC |
| | | UGCGGGACGCCGGCGCCCAGGUGUCCAUCAUGACCUACGACGAGU |
| | | UCAAGCACUGCUGGGACACCUUCGUGGACCACCAGGGCUGCCCCU |
| | | UCCAGCCCUGGGACGGCCUGGACGAGCACUCCCAGGCCCUGUCCG |
| | | GCCGGCUGCGGGCCAUCCUGCAGAACCAGGGCAACUCCGGCUCCG |
| | | AGACCCCCGGCACCUCCGAGUCCGCCACCCCCGAGUCCGCAGCGU |
| | | UCAAACCAAAUCCCAUCAACUACAUCCUGGGCCUGGCCAUCGGCA |
| | | UCGCCUCCGUGGGCUGGGCCAUGGUGGAGAUCGACGAGGAGGAG |
| | | AACCCCAUCCGGCUGAUCGACCUGGGCGUGCGGGUGUUCGAGCGG |
| | | GCCGAGGUGCCCAAGACCGGCGACUCCCUGGCCAUGGCCCGGCGG |
| | | CUGGCCCGGUCCGUGCGGCGGCUGACCCGGCGGCGGGCCCACCGG |
| | | CUGCUGCGGGCCCGGCGGCUGCUGAAGCGGGAGGGCGUGCUGCAG |
| | | GCCGCCGACUUCGACGAGAACGGCCUGAUCAAGUCCCUGCCCAAC |
| | | ACCCCCUGGCAGCUGCGGGCCGCCGCCCUGGACCGGAAGCUGACC |
| | | CCCCUGGAGUGGUCCGCCGUGCUGCUGCACCUGAUCAAGCACCGG |
| | | GGCUACCUGUCCCAGCGGAAGAACGAGGGCGAGACCGCCGACAAG |
| | | GAGCUGGGCGCCCUGCUGAAGGGCGUGGCCAACAACGCCCACGCC |
| | | CUGCAGACCGGCGACUUCCGGACCCCCGCCGAGCUGGCCCUGAAC |
| | | AAGUUCGAGAAGGAGUCCGGCCACAUCCGGAACCAGCGGGGCGAC |
| | | UACUCCCACACCUUCUCCCGGAAGGACCUGCAGGCCGAGCUGAUC |
| | | CUGCUGUUCGAGAAGCAGAAGGAGUUCGGCAACCCCCACGUGUCC |
| | | GGCGGCCUGAAGGAGGGCAUCGAGACCCUGCUGAUGACCCAGCGG |
| | | CCCGCCCUGUCCGGCGACGCCGUGCAGAAGAUGCUGGGCCACUGC |
| | | ACCUUCGAGCCCGCCGAGCCCAAGGCCGCCAAGAACACCUACACC |
| | | GCCGAGCGGUUCAUCUGGCUGACCAAGCUGAACAACCUGCGGAUC |
| | | CUGGAGCAGGGCUCCGAGCGGCCCCUGACCGACACCGAGCGGGCC |
| | | ACCCUGAUGGACGAGCCCUACCGGAAGUCCAAGCUGACCUACGCC |
| | | CAGGCCCGGAAGCUGCUGGGCCUGGAGGACACCGCCUUCUUCAAG |
| | | GGCCUGCGGUACGGCAAGGACAACGCCGAGGCCUCCACCCUGAUG |
| | | GAGAUGAAGGCCUACCACGCCAUCUCCCGGGCCCUGGAGAAGGAG |
| | | GGCCUGAAGGACAAGAAGUCCCCCCUGAACCUGUCCUCCGAGCUG |
| | | CAGGACGAGAUCGGCACCGCCUUCUCCCUGUUCAAGACCGACGAG |
| | | GACAUCACCGGCCGGCUGAAGGACCGGGUGCAGCCCGAGAUCCUG |
| | | GAGGCCCUGCUGAAGCACAUCUCCUUCGACAAGUUCGUGCAGAUC |
| | | UCCCUGAAGGCCCUGCGGCGGAUCGUGCCCCUGAUGGAGCAGGGC |
| | | AAGCGGUACGACGAGGCCUGCGCCGAGAUCUACGGCGACCACUAC |
| | | GGCAAGAAGAACACCGAGGAGAAGAUCUACCUGCCCCCCAUCCCC |
| | | GCCGACGAGAUCCGGAACCCCGUGGUGCUGCGGGCCCUGUCCCAG |
| | | GCCCGGAAGGUGAUCAACGGCGUGGUGCGGCGGUACGGCUCCCCC |
| | | GCCCGGAUCCACAUCGAGACCGCCCGGGAGGUGGGCAAGUCCUUC |
| | | AAGGACCGGAAGGAGAUCGAGAAGCGGCAGGAGGAGAACCGGAA |
| | | GGACCGGGAGAAGGCCGCCGCCAAGUUCCGGGAGUACUUCCCCAA |
| | | CUUCGUGGGCGAGCCCAAGUCCAAGGACAUCCUGAAGCUGCGGCU |
| | | GUACGAGCAGCAGCACGGCAAGUGCCUGUACUCCGGCAAGGAGA |
| | | UCAACCUGGUGCGGCUGAACGAGAAGGGCUACGUGGAGAUCGAC |
| | | CACGCCCUGCCCUUCUCCCGGACCUGGGACGACUCCUUCAACAAC |
| | | AAGGUGCUGGUGCUGGGCUCCGAGAACCAGAACAAGGGCAACCA |
| | | GACCCCCUACGAGUACUUCAACGGCAAGGACAACUCCCGGGAGUG |
| | | GCAGGAGUUCAAGGCCCGGGUGGAGACCUCCCGGUUCCCCCGGUC |
| | | CAAGAAGCAGCGGAUCCUGCUGCAGAAGUUCGACGAGGACGGCU |
| | | UCAAGGAGUGCAACCUGAACGACACCCGGUACGUGAACCGCUUCC |
| | | UGUGCCAGUUCGUGGCCGACCACAUCCUGCUGACCGGCAAGGGCA |
| | | AGCGGCGGGUGUUCGCCUCCAACGGCCAGAUCACCAACCUGCUGC |
| | | GGGGCUUCUGGGGCCUGCGGAAGGUGCGGGCCGAGAACGACCGG |
| | | CACCACGCCCUGGACGCCGUGGUGGUGGCCUGCUCCACCGUGGCC |
| | | AUGCAGCAGAAGAUCACCCGGUUCGUGCGGUACAAGGAGAUGAA |
| | | CGCCUUCGACGGCAAGACCAUCGACAAGGAGACCGGCAAGGUGCU |
| | | GCACCAGAAGACCCACUUCCCCCAGCCCUGGGAGUUCUUCGCCCA |
| | | GGAGGUGAUGAUCCGGGUGUUCGGCAAGCCCGACGGCAAGCCCG |
| | | AGUUCGAGGAGGCCGACACCCCCGAGAAGCUGCGGACCCUGCUGG |
| | | CCGAGAAGCUGUCCUCCCGGCCCGAGGCCGUGCACGAGUACGUGA |
| | | CCCCCCUGUUCGUGUCCCGGGCCCCCAACCGGAAGAUGUCCGGCG |
| | | CCCACAAGGACACCCUGCGGUCCGCCAAGCGGUUCGUGAAGCACA |
| | | ACGAGAAGAUCUCCGUGAAGCGGGUGUGGCUGACCGAGAUCAAG |
| | | CUGGCCGACCUGGAGAACAUGGUGAACUACAAGAACGGCCGGGA |
| | | GAUCGAGCUGUACGAGGCCCUGAAGGCCCGGCUGGAGGCCUACGG |
| | | CGGCAACGCCAAGCAGGCCUUCGACCCCAAGGACAACCCCUUCUA |
| | | CAAGAAGGGCGGCCAGCUGGUGAAGGCCGUGCGGGUGGAGAAGA |
| | | CCCAGGAGUCCGGCGUGCUGCUGAACAAGAAGAACGCCUACACCA |
| | | UCGCCGACAACGGCGACAUGGUGCGGGUGGACGUGUUCUGCAAG |
| | | GUGGACAAGAAGGGCAAGAACCAGUACUUCAUCGUGCCCAUCUA |
| | | CGCCUGGCAGGUGGCCGAGAACAUCCUGCCCGACAUCGACUGCAA |
| | | GGGCUACCGGAUCGACGACUCCUACACCUUCUGCUUCUCCCUGCA |
| | | CAAGUACGACCUGAUCGCCUUCCAGAAGGACGAGAAGUCCAAGG |
| | | UGGAGUUCGCCUACUACAUCAACUGCGACUCCUCCAACGGCCGGU |
| | | UCUACCUGGCCUGGCACGACAAGGGCUCCAAGGAGCAGCAGUUCC |
| | | GGAUCUCCACCCAGAACCUGGUGCUGAUCCAGAAGUACCAGGUGA |
| | | ACGAGCUGGGCAAGGAGAUCCGGCCCUGCCGGCUGAAGAAGCGGC |
| | | CCCCCGUGCGGUAGUGACUAGCACCAGCCUCAAGAACACCCGAAU |
| | | GGAGUCUCUAAGCUACAUAAUACCAACUUACACUUUACAAAAUG |
| | | UUGUCCCCCAAAAUGUAGCCAUUCGUAUCUGCUCCUAAUAAAAA |
| | | GAAAGUUUCUUCACAUUCUCUCGAGAAAAAAAAAAAAUGGAAAA |
| | | AAAAAAAACGGAAAAAAAAAAAGGUAAAAAAAAAAAAUAUAAAA |
| | | AAAAAAACAUAAAAAAAAAAAACGAAAAAAAAAAAACGUAAAAA |
| | | AAAAAAACUCAAAAAAAAAAAGAUAAAAAAAAAAAACCUAAAAA |
| | | AAAAAAAUGUAAAAAAAAAAAAGGGAAAAAAAAAAACGCAAAAA |
| | | AAAAAAACACAAAAAAAAAAAAUGCAAAAAAAAAAAAUCGAAAA |
| | | AAAAAAAAUCUAAAAAAAAAAAACGAAAAAAAAAAAACCCAAAA |
| | | AAAAAAAAGACAAAAAAAAAAAAUAGAAAAAAAAAAAGUUAAAA |
| | | AAAAAAAACUGAAAAAAAAAAAAUUUAAAAAAAAAAAAUCUAG |
| 180 | Open reading | atgaccggtgccgccttcaagcccaaccccatcaactacatcctgggcctggacatcggcatcgcctccgtggg |
| | frame for | ctgggccatggtggagatcgacgaggaggagaaccccatccggctgatcgacctgggcgtgcgggtgttcga |
| | Nme2Cas9 | gcgggccgaggtgcccaagaccggcgactccctggccatggcccggcggctggcccggtccgtgcggcgg |
| | encoded by | ctgacccggcggcgggcccaccggctgctgcgggcccggcggctgctgaagcgggagggcgtgctgcagg |
| | mRNA C | ccgccgacttcgacgagaacggcctgatcaagtccctgcccaacaccccctggcagctgcgggccgccgccc |
| | | tggaccggaagctgacccccctggagtggtccgccgtgctgctgcacctgatcaagcaccggggctacctgtc |
| | | ccagcggaagaacgagggcgagaccgccgacaaggagctgggcgccctgctgaagggcgtggccaacaa |
| | | cgcccacgccctgcagaccggcgacttccggacccccgccgagctggccctgaacaagttcgagaaggagtc |
| | | cggccacatccggaaccagcggggcgactactcccacaccttctcccggaaggacctgcaggccgagctgat |
| | | cctgctgttcgagaagcagaaggagttcggcaacccccacgtgtccggcggcctgaaggagggcatcgagac |
| | | cctgctgatgacccagcggcccgccctgtccggcgacgccgtgcagaagatgctgggccactgcaccttcga |
| | | gcccgccgagcccaaggccgccaagaacacctacaccgccgagcggttcatctggctgaccaagctgaacaa |
| | | cctgcggatcctggagcagggctccgagcggcccctgaccgacaccgagcgggccaccctgatggacgagc |
| | | cctaccggaagtccaagctgacctacgcccaggcccggaagctgctgggcctggaggacaccgccttcttcaa |
| | | gggcctgcggtacggcaaggacaacgccgaggcctccaccctgatggagatgaaggcctaccacgccatctc |
| | | ccgggccctggagaaggagggcctgaaggacaagaagtcccccctgaacctgtcctccgagctgcaggacg |
| | | agatcggcaccgccttctccctgttcaagaccgacgaggacatcaccggccggctgaaggaccgggtgcagc |
| | | ccgagatcctggaggccctgctgaagcacatctccttcgacaagttcgtgcagatctccctgaaggccctgcgg |
| | | cggatcgtgcccctgatggagcagggcaagcggtacgacgaggcctgcgccgagatctacggcgaccacta |
| | | cggcaagaagaacaccgaggagaagatctacctgccccccatccccgccgacgagatccggaaccccgtgg |
| | | tgctgcgggccctgtcccaggcccggaaggtgatcaacggcgtggtgcggcggtacggctcccccgcccgg |
| | | atccacatcgagaccgcccgggaggtgggcaagtccttcaaggaccggaaggagatcgagaagcggcagga |
| | | ggagaaccggaaggaccgggagaaggccgccgccaagttccgggagtacttccccaacttcgtgggcgagc |
| | | ccaagtccaaggacatcctgaagctgcggctgtacgagcagcagcacggcaagtgcctgtactccggcaagg |
| | | agatcaacctggtgcggctgaacgagaagggctacgtggagatcgaccacgccctgcccttctcccggacctg |
| | | ggacgactccttcaacaacaaggtgctggtgctgggctccgagaaccagaacaagggcaaccagacccccta |
| | | cgagtacttcaacggcaaggacaactcccgggagtggcaggagttcaaggcccgggtggagacctcccggtt |
| | | cccccggtccaagaagcagcggatcctgctgcagaagttcgacgaggacggcttcaaggagtgcaacctgaa |
| | | cgacacccggtacgtgaaccgcttcctgtgccagttcgtggccgaccacatcctgctgaccggcaagggcaag |
| | | cggcgggtgttcgcctccaacggccagatcaccaacctgctgcggggcttctggggcctgcggaaggtgcgg |
| | | gccgagaacgaccggcaccacgccctggacgccgtggtggtggcctgctccaccgtggccatgcagcagaa |
| | | gatcacccggttcgtgcggtacaaggagatgaacgccttcgacggcaagaccatcgacaaggagaccggcaa |
| | | ggtgctgcaccagaagacccacttcccccagccctgggagttcttcgcccaggaggtgatgatccgggtgttcg |
| | | gcaagcccgacggcaagcccgagttcgaggaggccgacacccccgagaagctgcggaccctgctggccga |
| | | gaagctgtcctcccggcccgaggccgtgcacgagtacgtgacccccctgttcgtgtcccgggcccccaaccgg |
| | | aagatgtccggcgcccacaaggacaccctgcggtccgccaagcggttcgtgaagcacaacgagaagatctcc |
| | | gtgaagcgggtgtggctgaccgagatcaagctggccgacctggagaacatggtgaactacaagaacggccgg |
| | | gagatcgagctgtacgaggccctgaaggcccggctggaggcctacggcggcaacgccaagcaggccttcga |
| | | ccccaaggacaaccccttctacaagaagggcggccagctggtgaaggccgtgcgggtggagaagacccagg |
| | | agtccggcgtgctgctgaacaagaagaacgcctacaccatcgccgacaacggcgacatggtgcgggtggacg |
| | | tgttctgcaaggtggacaagaagggcaagaaccagtacttcatcgtgcccatctacgcctggcaggtggccgag |
| | | aacatcctgcccgacatcgactgcaagggctaccggatcgacgactcctacaccttctgcttctccctgcacaag |
| | | tacgacctgatcgccttccagaaggacgagaagtccaaggtggagttcgcctactacatcaactgcgactcctcc |
| | | aacggccggttctacctggcctggcacgacaagggctccaaggagcagcagttccggatctccacccagaac |
| | | ctggtgctgatccagaagtaccaggtgaacgagctgggcaaggagatccggccctgccggctgaagaagcgg |
| | | ccccccgtgcggtccggaaagcggaccgccgacggctccgagttcgagtcccccaagaagaagcggaaggt |
| | | ggagtag |
| 181 | Open reading | ATGGCCGCCTTCAAGCCCAACCCCATCAACTACATCCTGGGCCTGG |
| | frame for | ACATCGGCATCGCCTCCGTGGGCTGGGCCATGGTGGAGATCGACGA |
| | Nme2Cas9 | GGAGGAGAACCCCATCCGGCTGATCGACCTGGGCGTGCGGGTGTTC |
| | encoded by | GAGCGGGCCGAGGTGCCCAAGACCGGCGACTCCCTGGCCATGGCCC |
| | mRNA H | GGCGGCTGGCCCGGTCCGTGCGGCGGCTGACCCGGCGGCGGGCCCA |
| | | CCGGCTGCTGCGGGCCCGGCGGCTGCTGAAGCGGGAGGGCGTGCTG |
| | | CAGGCCGCCGACTTCGACGAGAACGGCCTGATCAAGTCCCTGCCCA |
| | | ACACCCCCTGGCAGCTGCGGGCCGCCGCCCTGGACCGGAAGCTGAC |
| | | CCCCCTGGAGTGGTCCGCCGTGCTGCTGCACCTGATCAAGCACCGG |
| | | GGCTACCTGTCCCAGCGGAAGAACGAGGGCGAGACCGCCGACAAG |
| | | GAGCTGGGCGCCCTGCTGAAGGGCGTGGCCAACAACGCCCACGCCC |
| | | TGCAGACCGGCGACTTCCGGACCCCCGCCGAGCTGGCCCTGAACAA |
| | | GTTCGAGAAGGAGTCCGGCCACATCCGGAACCAGCGGGGCGACTA |
| | | CTCCCACACCTTCTCCCGGAAGGACCTGCAGGCCGAGCTGATCCTG |
| | | CTGTTCGAGAAGCAGAAGGAGTTCGGCAACCCCCACGTGTCCGGCG |
| | | GCCTGAAGGAGGGCATCGAGACCCTGCTGATGACCCAGCGGCCCGC |
| | | CCTGTCCGGCGACGCCGTGCAGAAGATGCTGGGCCACTGCACCTTC |
| | | GAGCCCGCCGAGCCCAAGGCCGCCAAGAACACCTACACCGCCGAG |
| | | CGGTTCATCTGGCTGACCAAGCTGAACAACCTGCGGATCCTGGAGC |
| | | AGGGCTCCGAGCGGCCCCTGACCGACACCGAGCGGGCCACCCTGAT |
| | | GGACGAGCCCTACCGGAAGTCCAAGCTGACCTACGCCCAGGCCCGG |
| | | AAGCTGCTGGGCCTGGAGGACACCGCCTTCTTCAAGGGCCTGCGGT |
| | | ACGGCAAGGACAACGCCGAGGCCTCCACCCTGATGGAGATGAAGG |
| | | CCTACCACGCCATCTCCCGGGCCCTGGAGAAGGAGGGCCTGAAGGA |
| | | CAAGAAGTCCCCCCTGAACCTGTCCTCCGAGCTGCAGGACGAGATC |
| | | GGCACCGCCTTCTCCCTGTTCAAGACCGACGAGGACATCACCGGCC |
| | | GGCTGAAGGACCGGGTGCAGCCCGAGATCCTGGAGGCCCTGCTGA |
| | | AGCACATCTCCTTCGACAAGTTCGTGCAGATCTCCCTGAAGGCCCT |
| | | GCGGCGGATCGTGCCCCTGATGGAGCAGGGCAAGCGGTACGACGA |
| | | GGCCTGCGCCGAGATCTACGGCGACCACTACGGCAAGAAGAACAC |
| | | CGAGGAGAAGATCTACCTGCCCCCCATCCCCGCCGACGAGATCCGG |
| | | AACCCCGTGGTGCTGCGGGCCCTGTCCCAGGCCCGGAAGGTGATCA |
| | | ACGGCGTGGTGCGGCGGTACGGCTCCCCCGCCCGGATCCACATCGA |
| | | GACCGCCCGGGAGGTGGGCAAGTCCTTCAAGGACCGGAAGGAGAT |
| | | CGAGAAGCGGCAGGAGGAGAACCGGAAGGACCGGGAGAAGGCCG |
| | | CCGCCAAGTTCCGGGAGTACTTCCCCAACTTCGTGGGCGAGCCCAA |
| | | GTCCAAGGACATCCTGAAGCTGCGGCTGTACGAGCAGCAGCACGGC |
| | | AAGTGCCTGTACTCCGGCAAGGAGATCAACCTGGTGCGGCTGAACG |
| | | AGAAGGGCTACGTGGAGATCGACCACGCCCTGCCCTTCTCCCGGAC |
| | | CTGGGACGACTCCTTCAACAACAAGGTGCTGGTGCTGGGCTCCGAG |
| | | AACCAGAACAAGGGCAACCAGACCCCCTACGAGTACTTCAACGGC |
| | | AAGGACAACTCCCGGGAGTGGCAGGAGTTCAAGGCCCGGGTGGAG |
| | | ACCTCCCGGTTCCCCCGGTCCAAGAAGCAGCGGATCCTGCTGCAGA |
| | | AGTTCGACGAGGACGGCTTCAAGGAGTGCAACCTGAACGACACCC |
| | | GGTACGTGAACCGGTTCCTGTGCCAGTTCGTGGCCGACCACATCCT |
| | | GCTGACCGGCAAGGGCAAGCGGCGGGTGTTCGCCTCCAACGGCCA |
| | | GATCACCAACCTGCTGCGGGGCTTCTGGGGCCTGCGGAAGGTGCGG |
| | | GCCGAGAACGACCGGCACCACGCCCTGGACGCCGTGGTGGTGGCCT |
| | | GCTCCACCGTGGCCATGCAGCAGAAGATCACCCGGTTCGTGCGGTA |
| | | CAAGGAGATGAACGCCTTCGACGGCAAGACCATCGACAAGGAGAC |
| | | CGGCAAGGTGCTGCACCAGAAGACCCACTTCCCCCAGCCCTGGGAG |
| | | TTCTTCGCCCAGGAGGTGATGATCCGGGTGTTCGGCAAGCCCGACG |
| | | GCAAGCCCGAGTTCGAGGAGGCCGACACCCCCGAGAAGCTGCGGA |
| | | CCCTGCTGGCCGAGAAGCTGTCCTCCCGGCCCGAGGCCGTGCACGA |
| | | GTACGTGACCCCCCTGTTCGTGTCCCGGGCCCCCAACCGGAAGATG |
| | | TCCGGCGCCCACAAGGACACCCTGCGGTCCGCCAAGCGGTTCGTGA |
| | | AGCACAACGAGAAGATCTCCGTGAAGCGGGTGTGGCTGACCGAGA |
| | | TCAAGCTGGCCGACCTGGAGAACATGGTGAACTACAAGAACGGCC |
| | | GGGAGATCGAGCTGTACGAGGCCCTGAAGGCCCGGCTGGAGGCCT |
| | | ACGGCGGCAACGCCAAGCAGGCCTTCGACCCCAAGGACAACCCCTT |
| | | CTACAAGAAGGGCGGCCAGCTGGTGAAGGCCGTGCGGGTGGAGAA |
| | | GACCCAGGAGTCCGGCGTGCTGCTGAACAAGAAGAACGCCTACAC |
| | | CATCGCCGACAACGGCGACATGGTGCGGGTGGACGTGTTCTGCAAG |
| | | GTGGACAAGTCCGGCGGCGGCTCCCCCAAGAAGAAGCGGAAGGTG |
| | | TCCGGCGGCTCCGGCAAGAACCAGTACTTCATCGTGCCCATCTACG |
| | | CCTGGCAGGTGGCCGAGAACATCCTGCCCGACATCGACTGCAAGGG |
| | | CTACCGGATCGACGACTCCTACACCTTCTGCTTCTCCCTGCACAAGT |
| | | ACGACCTGATCGCCTTCCAGAAGGACGAGAAGTCCAAGGTGGAGTT |
| | | CGCCTACTACATCAACTGCGACTCCTCCAACGGCCGGTTCTACCTGG |
| | | CCTGGCACGACAAGGGCTCCAAGGAGCAGCAGTTCCGGATCTCCAC |
| | | CCAGAACCTGGTGCTGATCCAGAAGTACCAGGTGAACGAGCTGGGC |
| | | AAGGAGATCCGGCCCTGCCGGCTGAAGAAGCGGCCCCCCGTGCGGT |
| | | AG |
| 182 | Open reading | ATGGTGCCCAAGAAGAAGCGGAAGGTGGCCGCCTTCAAGCCCAAC |
| | frame for | CCCATCAACTACATCCTGGGCCTGGACATCGGCATCGCCTCCGTGG |
| | Nme2Cas9 | GCTGGGCCATGGTGGAGATCGACGAGGAGGAGAACCCCATCCGGC |
| | encoded by | TGATCGACCTGGGCGTGCGGGTGTTCGAGCGGGCCGAGGTGCCCAA |
| | mRNA I | GACCGGCGACTCCCTGGCCATGGCCCGGCGGCTGGCCCGGTCCGTG |
| | | CGGCGGCTGACCCGGCGGCGGGCCCACCGGCTGCTGCGGGCCCGGC |
| | | GGCTGCTGAAGCGGGAGGGCGTGCTGCAGGCCGCCGACTTCGACG |
| | | AGAACGGCCTGATCAAGTCCCTGCCCAACACCCCCTGGCAGCTGCG |
| | | GGCCGCCGCCCTGGACCGGAAGCTGACCCCCCTGGAGTGGTCCGCC |
| | | GTGCTGCTGCACCTGATCAAGCACCGGGGCTACCTGTCCCAGCGGA |
| | | AGAACGAGGGCGAGACCGCCGACAAGGAGCTGGGCGCCCTGCTGA |
| | | AGGGCGTGGCCAACAACGCCCACGCCCTGCAGACCGGCGACTTCCG |
| | | GACCCCCGCCGAGCTGGCCCTGAACAAGTTCGAGAAGGAGTCCGGC |
| | | CACATCCGGAACCAGCGGGGCGACTACTCCCACACCTTCTCCCGGA |
| | | AGGACCTGCAGGCCGAGCTGATCCTGCTGTTCGAGAAGCAGAAGG |
| | | AGTTCGGCAACCCCCACGTGTCCGGCGGCCTGAAGGAGGGCATCGA |
| | | GACCCTGCTGATGACCCAGCGGCCCGCCCTGTCCGGCGACGCCGTG |
| | | CAGAAGATGCTGGGCCACTGCACCTTCGAGCCCGCCGAGCCCAAGG |
| | | CCGCCAAGAACACCTACACCGCCGAGCGGTTCATCTGGCTGACCAA |
| | | GCTGAACAACCTGCGGATCCTGGAGCAGGGCTCCGAGCGGCCCCTG |
| | | ACCGACACCGAGCGGGCCACCCTGATGGACGAGCCCTACCGGAAG |
| | | TCCAAGCTGACCTACGCCCAGGCCCGGAAGCTGCTGGGCCTGGAGG |
| | | ACACCGCCTTCTTCAAGGGCCTGCGGTACGGCAAGGACAACGCCGA |
| | | GGCCTCCACCCTGATGGAGATGAAGGCCTACCACGCCATCTCCCGG |
| | | GCCCTGGAGAAGGAGGGCCTGAAGGACAAGAAGTCCCCCCTGAAC |
| | | CTGTCCTCCGAGCTGCAGGACGAGATCGGCACCGCCTTCTCCCTGTT |
| | | CAAGACCGACGAGGACATCACCGGCCGGCTGAAGGACCGGGTGCA |
| | | GCCCGAGATCCTGGAGGCCCTGCTGAAGCACATCTCCTTCGACAAG |
| | | TTCGTGCAGATCTCCCTGAAGGCCCTGCGGCGGATCGTGCCCCTGA |
| | | TGGAGCAGGGCAAGCGGTACGACGAGGCCTGCGCCGAGATCTACG |
| | | GCGACCACTACGGCAAGAAGAACACCGAGGAGAAGATCTACCTGC |
| | | CCCCCATCCCCGCCGACGAGATCCGGAACCCCGTGGTGCTGCGGGC |
| | | CCTGTCCCAGGCCCGGAAGGTGATCAACGGCGTGGTGCGGCGGTAC |
| | | GGCTCCCCCGCCCGGATCCACATCGAGACCGCCCGGGAGGTGGGCA |
| | | AGTCCTTCAAGGACCGGAAGGAGATCGAGAAGCGGCAGGAGGAGA |
| | | ACCGGAAGGACCGGGAGAAGGCCGCCGCCAAGTTCCGGGAGTACT |
| | | TCCCCAACTTCGTGGGCGAGCCCAAGTCCAAGGACATCCTGAAGCT |
| | | GCGGCTGTACGAGCAGCAGCACGGCAAGTGCCTGTACTCCGGCAAG |
| | | GAGATCAACCTGGTGCGGCTGAACGAGAAGGGCTACGTGGAGATC |
| | | GACCACGCCCTGCCCTTCTCCCGGACCTGGGACGACTCCTTCAACA |
| | | ACAAGGTGCTGGTGCTGGGCTCCGAGAACCAGAACAAGGGCAACC |
| | | AGACCCCCTACGAGTACTTCAACGGCAAGGACAACTCCCGGGAGTG |
| | | GCAGGAGTTCAAGGCCCGGGTGGAGACCTCCCGGTTCCCCCGGTCC |
| | | AAGAAGCAGCGGATCCTGCTGCAGAAGTTCGACGAGGACGGCTTC |
| | | AAGGAGTGCAACCTGAACGACACCCGGTACGTGAACCGGTTCCTGT |
| | | GCCAGTTCGTGGCCGACCACATCCTGCTGACCGGCAAGGGCAAGCG |
| | | GCGGGTGTTCGCCTCCAACGGCCAGATCACCAACCTGCTGCGGGGC |
| | | TTCTGGGGCCTGCGGAAGGTGCGGGCCGAGAACGACCGGCACCAC |
| | | GCCCTGGACGCCGTGGTGGTGGCCTGCTCCACCGTGGCCATGCAGC |
| | | AGAAGATCACCCGGTTCGTGCGGTACAAGGAGATGAACGCCTTCGA |
| | | CGGCAAGACCATCGACAAGGAGACCGGCAAGGTGCTGCACCAGAA |
| | | GACCCACTTCCCCCAGCCCTGGGAGTTCTTCGCCCAGGAGGTGATG |
| | | ATCCGGGTGTTCGGCAAGCCCGACGGCAAGCCCGAGTTCGAGGAG |
| | | GCCGACACCCCCGAGAAGCTGCGGACCCTGCTGGCCGAGAAGCTGT |
| | | CCTCCCGGCCCGAGGCCGTGCACGAGTACGTGACCCCCCTGTTCGT |
| | | GTCCCGGGCCCCCAACCGGAAGATGTCCGGCGCCCACAAGGACACC |
| | | CTGCGGTCCGCCAAGCGGTTCGTGAAGCACAACGAGAAGATCTCCG |
| | | TGAAGCGGGTGTGGCTGACCGAGATCAAGCTGGCCGACCTGGAGA |
| | | ACATGGTGAACTACAAGAACGGCCGGGAGATCGAGCTGTACGAGG |
| | | CCCTGAAGGCCCGGCTGGAGGCCTACGGCGGCAACGCCAAGCAGG |
| | | CCTTCGACCCCAAGGACAACCCCTTCTACAAGAAGGGCGGCCAGCT |
| | | GGTGAAGGCCGTGCGGGTGGAGAAGACCCAGGAGTCCGGCGTGCT |
| | | GCTGAACAAGAAGAACGCCTACACCATCGCCGACAACGGCGACAT |
| | | GGTGCGGGTGGACGTGTTCTGCAAGGTGGACAAGAAGGGCAAGAA |
| | | CCAGTACTTCATCGTGCCCATCTACGCCTGGCAGGTGGCCGAGAAC |
| | | ATCCTGCCCGACATCGACTGCAAGGGCTACCGGATCGACGACTCCT |
| | | ACACCTTCTGCTTCTCCCTGCACAAGTACGACCTGATCGCCTTCCAG |
| | | AAGGACGAGAAGTCCAAGGTGGAGTTCGCCTACTACATCAACTGCG |
| | | ACTCCTCCAACGGCCGGTTCTACCTGGCCTGGCACGACAAGGGCTC |
| | | CAAGGAGCAGCAGTTCCGGATCTCCACCCAGAACCTGGTGCTGATC |
| | | CAGAAGTACCAGGTGAACGAGCTGGGCAAGGAGATCCGGCCCTGC |
| | | CGGCTGAAGAAGCGGCCCCCCGTGCGGTACCCCTACGACGTGCCCG |
| | | ACTACGCCGCCGCCCCCGCCGCCAAGAAGAAGAAGCTGGACTAG |
| 183 | Open reading | ATGGCCGCCTTCAAGCCCAACCCCATCAACTACATCCTGGGCCTGG |
| | frame for | ACATCGGCATCGCCTCCGTGGGCTGGGCCATGGTGGAGATCGACGA |
| | Nme2Cas9 | GGAGGAGAACCCCATCCGGCTGATCGACCTGGGCGTGCGGGTGTTC |
| | encoded by | GAGCGGGCCGAGGTGCCCAAGACCGGCGACTCCCTGGCCATGGCCC |
| | mRNA J | GGCGGCTGGCCCGGTCCGTGCGGCGGCTGACCCGGCGGCGGGCCCA |
| | | CCGGCTGCTGCGGGCCCGGCGGCTGCTGAAGCGGGAGGGCGTGCTG |
| | | CAGGCCGCCGACTTCGACGAGAACGGCCTGATCAAGTCCCTGCCCA |
| | | ACACCCCCTGGCAGCTGCGGGCCGCCGCCCTGGACCGGAAGCTGAC |
| | | CCCCCTGGAGTGGTCCGCCGTGCTGCTGCACCTGATCAAGCACCGG |
| | | GGCTACCTGTCCCAGCGGAAGAACGAGGGCGAGACCGCCGACAAG |
| | | GAGCTGGGCGCCCTGCTGAAGGGCGTGGCCAACAACGCCCACGCCC |
| | | TGCAGACCGGCGACTTCCGGACCCCCGCCGAGCTGGCCCTGAACAA |
| | | GTTCGAGAAGGAGTCCGGCCACATCCGGAACCAGCGGGGCGACTA |
| | | CTCCCACACCTTCTCCCGGAAGGACCTGCAGGCCGAGCTGATCCTG |
| | | CTGTTCGAGAAGCAGAAGGAGTTCGGCAACCCCCACGTGTCCGGCG |
| | | GCCTGAAGGAGGGCATCGAGACCCTGCTGATGACCCAGCGGCCCGC |
| | | CCTGTCCGGCGACGCCGTGCAGAAGATGCTGGGCCACTGCACCTTC |
| | | GAGCCCGCCGAGCCCAAGGCCGCCAAGAACACCTACACCGCCGAG |
| | | CGGTTCATCTGGCTGACCAAGCTGAACAACCTGCGGATCCTGGAGC |
| | | AGGGCTCCGAGCGGCCCCTGACCGACACCGAGCGGGCCACCCTGAT |
| | | GGACGAGCCCTACCGGAAGTCCAAGCTGACCTACGCCCAGGCCCGG |
| | | AAGCTGCTGGGCCTGGAGGACACCGCCTTCTTCAAGGGCCTGCGGT |
| | | ACGGCAAGGACAACGCCGAGGCCTCCACCCTGATGGAGATGAAGG |
| | | CCTACCACGCCATCTCCCGGGCCCTGGAGAAGGAGGGCCTGAAGGA |
| | | CAAGAAGTCCCCCCTGAACCTGTCCTCCGAGCTGCAGGACGAGATC |
| | | GGCACCGCCTTCTCCCTGTTCAAGACCGACGAGGACATCACCGGCC |
| | | GGCTGAAGGACCGGGTGCAGCCCGAGATCCTGGAGGCCCTGCTGA |
| | | AGCACATCTCCTTCGACAAGTTCGTGCAGATCTCCCTGAAGGCCCT |
| | | GCGGCGGATCGTGCCCCTGATGGAGCAGGGCAAGCGGTACGACGA |
| | | GGCCTGCGCCGAGATCTACGGCGACCACTACGGCAAGAAGAACAC |
| | | CGAGGAGAAGATCTACCTGCCCCCCATCCCCGCCGACGAGATCCGG |
| | | AACCCCGTGGTGCTGCGGGCCCTGTCCCAGGCCCGGAAGGTGATCA |
| | | ACGGCGTGGTGCGGCGGTACGGCTCCCCCGCCCGGATCCACATCGA |
| | | GACCGCCCGGGAGGTGGGCAAGTCCTTCAAGGACCGGAAGGAGAT |
| | | CGAGAAGCGGCAGGAGGAGAACCGGAAGGACCGGGAGAAGGCCG |
| | | CCGCCAAGTTCCGGGAGTACTTCCCCAACTTCGTGGGCGAGCCCAA |
| | | GTCCAAGGACATCCTGAAGCTGCGGCTGTACGAGCAGCAGCACGGC |
| | | AAGTGCCTGTACTCCGGCAAGGAGATCAACCTGGTGCGGCTGAACG |
| | | AGAAGGGCTACGTGGAGATCGACCACGCCCTGCCCTTCTCCCGGAC |
| | | CTGGGACGACTCCTTCAACAACAAGGTGCTGGTGCTGGGCTCCGAG |
| | | AACCAGAACAAGGGCAACCAGACCCCCTACGAGTACTTCAACGGC |
| | | AAGGACAACTCCCGGGAGTGGCAGGAGTTCAAGGCCCGGGTGGAG |
| | | ACCTCCCGGTTCCCCCGGTCCAAGAAGCAGCGGATCCTGCTGCAGA |
| | | AGTTCGACGAGGACGGCTTCAAGGAGTGCAACCTGAACGACACCC |
| | | GGTACGTGAACCGGTTCCTGTGCCAGTTCGTGGCCGACCACATCCT |
| | | GCTGACCGGCAAGGGCAAGCGGCGGGTGTTCGCCTCCAACGGCCA |
| | | GATCACCAACCTGCTGCGGGGCTTCTGGGGCCTGCGGAAGGTGCGG |
| | | GCCGAGAACGACCGGCACCACGCCCTGGACGCCGTGGTGGTGGCCT |
| | | GCTCCACCGTGGCCATGCAGCAGAAGATCACCCGGTTCGTGCGGTA |
| | | CAAGGAGATGAACGCCTTCGACGGCAAGACCATCGACAAGGAGAC |
| | | CGGCAAGGTGCTGCACCAGAAGACCCACTTCCCCCAGCCCTGGGAG |
| | | TTCTTCGCCCAGGAGGTGATGATCCGGGTGTTCGGCAAGCCCGACG |
| | | GCAAGCCCGAGTTCGAGGAGGCCGACACCCCCGAGAAGCTGCGGA |
| | | CCCTGCTGGCCGAGAAGCTGTCCTCCCGGCCCGAGGCCGTGCACGA |
| | | GTACGTGACCCCCCTGTTCGTGTCCCGGGCCCCCAACCGGAAGATG |
| | | TCCGGCGCCCACAAGGACACCCTGCGGTCCGCCAAGCGGTTCGTGA |
| | | AGCACAACGAGAAGATCTCCGTGAAGCGGGTGTGGCTGACCGAGA |
| | | TCAAGCTGGCCGACCTGGAGAACATGGTGAACTACAAGAACGGCC |
| | | GGGAGATCGAGCTGTACGAGGCCCTGAAGGCCCGGCTGGAGGCCT |
| | | ACGGCGGCAACGCCAAGCAGGCCTTCGACCCCAAGGACAACCCCTT |
| | | CTACAAGAAGGGCGGCCAGCTGGTGAAGGCCGTGCGGGTGGAGAA |
| | | GACCCAGGAGTCCGGCGTGCTGCTGAACAAGAAGAACGCCTACAC |
| | | CATCGCCGACAACGGCGACATGGTGCGGGTGGACGTGTTCTGCAAG |
| | | GTGGACAAGAAGGGCAAGAACCAGTACTTCATCGTGCCCATCTACG |
| | | CCTGGCAGGTGGCCGAGAACATCCTGCCCGACATCGACTGCAAGGG |
| | | CTACCGGATCGACGACTCCTACACCTTCTGCTTCTCCCTGCACAAGT |
| | | ACGACCTGATCGCCTTCCAGAAGGACGAGAAGTCCAAGGTGGAGTT |
| | | CGCCTACTACATCAACTGCGACTCCTCCAACGGCCGGTTCTACCTGG |
| | | CCTGGCACGACAAGGGCTCCAAGGAGCAGCAGTTCCGGATCTCCAC |
| | | CCAGAACCTGGTGCTGATCCAGAAGTACCAGGTGAACGAGCTGGGC |
| | | AAGGAGATCCGGCCCTGCCGGCTGAAGAAGCGGCCCCCCGTGCGG |
| 184 | Open reading | atggccgccttcaagcccaaccccatcaactacatcctgggcctggacatcggcatcgcctccgtgggctgggc |
| | frame for | catggtggagatcgacgaggaggagaaccccatccggctgatcgacctgggcgtgcgggtgttcgagcgggc |
| | Nme2Cas9 | cgaggtgcccaagaccggcgactccctggccatggcccggcggctggcccggtccgtgcggcggctgaccc |
| | encoded by | ggcggcgggcccaccggctgctgcgggcccggcggctgctgaagcgggagggcgtgctgcaggccgccg |
| | mRNA K | acttcgacgagaacggcctgatcaagtccctgcccaacaccccctggcagctgcgggccgccgccctggacc |
| | | ggaagctgacccccctggagtggtccgccgtgctgctgcacctgatcaagcaccggggctacctgtcccagcg |
| | | gaagaacgagggcgagaccgccgacaaggagctgggcgccctgctgaagggcgtggccaacaacgccca |
| | | cgccctgcagaccggcgacttccggacccccgccgagctggccctgaacaagttcgagaaggagtccggcc |
| | | acatccggaaccagcggggcgactactcccacaccttctcccggaaggacctgcaggccgagctgatcctgct |
| | | gttcgagaagcagaaggagttcggcaacccccacgtgtccggcggcctgaaggagggcatcgagaccctgct |
| | | gatgacccagcggcccgccctgtccggcgacgccgtgcagaagatgctgggccactgcaccttcgagcccgc |
| | | cgagcccaaggccgccaagaacacctacaccgccgagcggttcatctggctgaccaagctgaacaacctgcg |
| | | gatcctggagcagggctccgagcggcccctgaccgacaccgagcgggccaccctgatggacgagccctacc |
| | | ggaagtccaagctgacctacgcccaggcccggaagctgctgggcctggaggacaccgccttcttcaagggcc |
| | | tgcggtacggcaaggacaacgccgaggcctccaccctgatggagatgaaggcctaccacgccatctcccggg |
| | | ccctggagaaggagggcctgaaggacaagaagtcccccctgaacctgtcctccgagctgcaggacgagatcg |
| | | gcaccgccttctccctgttcaagaccgacgaggacatcaccggccggctgaaggaccgggtgcagcccgaga |
| | | tcctggaggccctgctgaagcacatctccttcgacaagttcgtgcagatctccctgaaggccctgcggcggatcg |
| | | tgcccctgatggagcagggcaagcggtacgacgaggcctgcgccgagatctacggcgaccactacggcaag |
| | | aagaacaccgaggagaagatctacctgccccccatccccgccgacgagatccggaaccccgtggtgctgcgg |
| | | gccctgtcccaggcccggaaggtgatcaacggcgtggtgcggcggtacggctcccccgcccggatccacatc |
| | | gagaccgcccgggaggtgggcaagtccttcaaggaccggaaggagatcgagaagcggcaggaggagaac |
| | | cggaaggaccgggagaaggccgccgccaagttccgggagtacttccccaacttcgtgggcgagcccaagtcc |
| | | aaggacatcctgaagctgcggctgtacgagcagcagcacggcaagtgcctgtactccggcaaggagatcaac |
| | | ctggtgcggctgaacgagaagggctacgtggagatcgaccacgccctgcccttctcccggacctgggacgact |
| | | ccttcaacaacaaggtgctggtgctgggctccgagaaccagaacaagggcaaccagaccccctacgagtactt |
| | | caacggcaaggacaactcccgggagtggcaggagttcaaggcccgggtggagacctcccggttcccccggt |
| | | ccaagaagcagcggatcctgctgcagaagttcgacgaggacggcttcaaggagtgcaacctgaacgacaccc |
| | | ggtacgtgaaccggttcctgtgccagttcgtggccgaccacatcctgctgaccggcaagggcaagcggcgggt |
| | | gttcgcctccaacggccagatcaccaacctgctgcggggcttctggggcctgcggaaggtgcgggccgagaa |
| | | cgaccggcaccacgccctggacgccgtggtggtggcctgctccaccgtggccatgcagcagaagatcacccg |
| | | gttcgtgcggtacaaggagatgaacgccttcgacggcaagaccatcgacaaggagaccggcaaggtgctgca |
| | | ccagaagacccacttcccccagccctgggagttcttcgcccaggaggtgatgatccgggtgttcggcaagccc |
| | | gacggcaagcccgagttcgaggaggccgacacccccgagaagctgcggaccctgctggccgagaagctgtc |
| | | ctcccggcccgaggccgtgcacgagtacgtgacccccctgttcgtgtcccgggcccccaaccggaagatgtcc |
| | | ggcgcccacaaggacaccctgcggtccgccaagcggttcgtgaagcacaacgagaagatctccgtgaagcg |
| | | ggtgtggctgaccgagatcaagctggccgacctggagaacatggtgaactacaagaacggccgggagatcga |
| | | gctgtacgaggccctgaaggcccggctggaggcctacggcggcaacgccaagcaggccttcgaccccaagg |
| | | acaaccccttctacaagaagggcggccagctggtgaaggccgtgcgggtggagaagacccaggagtccggc |
| | | gtgctgctgaacaagaagaacgcctacaccatcgccgacaacggcgacatggtgcgggtggacgtgttctgca |
| | | aggtggacaagaagggcaagaaccagtacttcatcgtgcccatctacgcctggcaggtggccgagaacatcct |
| | | gcccgacatcgactgcaagggctaccggatcgacgactcctacaccttctgcttctccctgcacaagtacgacct |
| | | gatcgccttccagaaggacgagaagtccaaggtggagttcgcctactacatcaactgcgactcctccaacggcc |
| | | ggttctacctggcctggcacgacaagggctccaaggagcagcagttccggatctccacccagaacctggtgct |
| | | gatccagaagtaccaggtgaacgagctgggcaaggagatccggccctgccggctgaagaagcggccccccg |
| | | tgcgg |
| 185 | Open reading | atgGACGGCTCCGGCGGCGGCTCCCCCAAGAAGAAGCGGAAGGTGG |
| | frame for | GCGGCTCCGGCGGCGGCgccgccttcaagcccaaccccatcaactacatcctgggcctggacat |
| | Nme2Cas9 | cggcatcgcctccgtgggctgggccatggtggagatcgacgaggaggagaaccccatccggctgatcgacct |
| | encoded by | gggcgtgcgggtgttcgagcgggccgaggtgcccaagaccggcgactccctggccatggcccggcggctgg |
| | mRNA L | cccggtccgtgcggcggctgacccggcggcgggcccaccggctgctgcgggcccggggctgctgaagcg |
| | | ggagggcgtgctgcaggccgccgacttcgacgagaacggcctgatcaagtccctgcccaacaccccctggca |
| | | gctgcgggccgccgccctggaccggaagctgacccccctggagtggtccgccgtgctgctgcacctgatcaa |
| | | gcaccggggctacctgtcccagcggaagaacgagggcgagaccgccgacaaggagctgggcgccctgctg |
| | | aagggcgtggccaacaacgcccacgccctgcagaccggcgacttccggacccccgccgagctggccctgaa |
| | | caagttcgagaaggagtccggccacatccggaaccagcggggcgactactcccacaccttctcccggaagga |
| | | cctgcaggccgagctgatcctgctgttcgagaagcagaaggagttcggcaacccccacgtgtccggcggcctg |
| | | aaggagggcatcgagaccctgctgatgacccagcggcccgccctgtccggcgacgccgtgcagaagatgct |
| | | gggccactgcaccttcgagcccgccgagcccaaggccgccaagaacacctacaccgccgagcggttcatctg |
| | | gctgaccaagctgaacaacctgcggatcctggagcagggctccgagcggcccctgaccgacaccgagcggg |
| | | ccaccctgatggacgagccctaccggaagtccaagctgacctacgcccaggcccggaagctgctgggcctgg |
| | | aggacaccgccttcttcaagggcctgcggtacggcaaggacaacgccgaggcctccaccctgatggagatga |
| | | aggcctaccacgccatctcccgggccctggagaaggagggcctgaaggacaagaagtcccccctgaacctgt |
| | | cctccgagctgcaggacgagatcggcaccgccttctccctgttcaagaccgacgaggacatcaccggccggct |
| | | gaaggaccgggtgcagcccgagatcctggaggccctgctgaagcacatctccttcgacaagttcgtgcagatct |
| | | ccctgaaggccctgcggcggatcgtgcccctgatggagcagggcaagcggtacgacgaggcctgcgccgag |
| | | atctacggcgaccactacggcaagaagaacaccgaggagaagatctacctgccccccatccccgccgacgag |
| | | atccggaaccccgtggtgctgcgggccctgtcccaggcccggaaggtgatcaacggcgtggtgcggcggtac |
| | | ggctcccccgcccggatccacatcgagaccgcccgggaggtgggcaagtccttcaaggaccggaaggagat |
| | | cgagaagcggcaggaggagaaccggaaggaccgggagaaggccgccgccaagttccgggagtacttcccc |
| | | aacttcgtgggcgagcccaagtccaaggacatcctgaagctgcggctgtacgagcagcagcacggcaagtgc |
| | | ctgtactccggcaaggagatcaacctggtgcggctgaacgagaagggctacgtggagatcgaccacgccctg |
| | | cccttctcccggacctgggacgactccttcaacaacaaggtgctggtgctgggctccgagaaccagaacaagg |
| | | gcaaccagaccccctacgagtacttcaacggcaaggacaactcccgggagtggcaggagttcaaggcccgg |
| | | gtggagacctcccggttcccccggtccaagaagcagcggatcctgctgcagaagttcgacgaggacggcttca |
| | | aggagtgcaacctgaacgacacccggtacgtgaaccggttcctgtgccagttcgtggccgaccacatcctgctg |
| | | accggcaagggcaagcggcgggtgttcgcctccaacggccagatcaccaacctgctgcggggcttctggggc |
| | | ctgcggaaggtgcgggccgagaacgaccggcaccacgccctggacgccgtggtggtggcctgctccaccgt |
| | | ggccatgcagcagaagatcacccggttcgtgcggtacaaggagatgaacgccttcgacggcaagaccatcga |
| | | caaggagaccggcaaggtgctgcaccagaagacccacttcccccagccctgggagttcttcgcccaggaggt |
| | | gatgatccgggtgttcggcaagcccgacggcaagcccgagttcgaggaggccgacacccccgagaagctgc |
| | | ggaccctgctggccgagaagctgtcctcccggcccgaggccgtgcacgagtacgtgacccccctgttcgtgtc |
| | | ccgggcccccaaccggaagatgtccggcgcccacaaggacaccctgcggtccgccaagcggttcgtgaagc |
| | | acaacgagaagatctccgtgaagcgggtgtggctgaccgagatcaagctggccgacctggagaacatggtga |
| | | actacaagaacggccgggagatcgagctgtacgaggccctgaaggcccggctggaggcctacggcggcaac |
| | | gccaagcaggccttcgaccccaaggacaaccccttctacaagaagggcggccagctggtgaaggccgtgcg |
| | | ggtggagaagacccaggagtccggcgtgctgctgaacaagaagaacgcctacaccatcgccgacaacggcg |
| | | acatggtgcgggtggacgtgttctgcaaggtggacaagaagggcaagaaccagtacttcatcgtgcccatctac |
| | | gcctggcaggtggccgagaacatcctgcccgacatcgactgcaagggctaccggatcgacgactcctacacct |
| | | tctgcttctccctgcacaagtacgacctgatcgccttccagaaggacgagaagtccaaggtggagttcgcctact |
| | | acatcaactgcgactcctccaacggccggttctacctggcctggcacgacaagggctccaaggagcagcagtt |
| | | ccggatctccacccagaacctggtgctgatccagaagtaccaggtgaacgagctgggcaaggagatccggcc |
| | | ctgccggctgaagaagcggccccccgtgcggtag |
| 186 | Open reading | ATGGACGGCTCCGGCGGCGGCTCCCCCAAGAAGAAGCGGAAGGTG |
| | frame for | GGCGGCTCCGGCGGCGGCGCCGCCTTCAAGCCCAACCCCATCAACT |
| | Nme2Cas9 with | ACATCCTGGGCCTGGACATCGGCATCGCCTCCGTGGGCTGGGCCAT |
| | HiBiT tag | GGTGGAGATCGACGAGGAGGAGAACCCCATCCGGCTGATCGACCT |
| | encoded by | GGGCGTGCGGGTGTTCGAGCGGGCCGAGGTGCCCAAGACCGGCGA |
| | mRNA M | CTCCCTGGCCATGGCCCGGCGGCTGGCCCGGTCCGTGCGGCGGCTG |
| | | ACCCGGCGGCGGGCCCACCGGCTGCTGCGGGCCCGGCGGCTGCTGA |
| | | AGCGGGAGGGCGTGCTGCAGGCCGCCGACTTCGACGAGAACGGCC |
| | | TGATCAAGTCCCTGCCCAACACCCCCTGGCAGCTGCGGGCCGCCGC |
| | | CCTGGACCGGAAGCTGACCCCCCTGGAGTGGTCCGCCGTGCTGCTG |
| | | CACCTGATCAAGCACCGGGGCTACCTGTCCCAGCGGAAGAACGAG |
| | | GGCGAGACCGCCGACAAGGAGCTGGGCGCCCTGCTGAAGGGCGTG |
| | | GCCAACAACGCCCACGCCCTGCAGACCGGCGACTTCCGGACCCCCG |
| | | CCGAGCTGGCCCTGAACAAGTTCGAGAAGGAGTCCGGCCACATCCG |
| | | GAACCAGCGGGGCGACTACTCCCACACCTTCTCCCGGAAGGACCTG |
| | | CAGGCCGAGCTGATCCTGCTGTTCGAGAAGCAGAAGGAGTTCGGCA |
| | | ACCCCCACGTGTCCGGCGGCCTGAAGGAGGGCATCGAGACCCTGCT |
| | | GATGACCCAGCGGCCCGCCCTGTCCGGCGACGCCGTGCAGAAGATG |
| | | CTGGGCCACTGCACCTTCGAGCCCGCCGAGCCCAAGGCCGCCAAGA |
| | | ACACCTACACCGCCGAGCGGTTCATCTGGCTGACCAAGCTGAACAA |
| | | CCTGCGGATCCTGGAGCAGGGCTCCGAGCGGCCCCTGACCGACACC |
| | | GAGCGGGCCACCCTGATGGACGAGCCCTACCGGAAGTCCAAGCTG |
| | | ACCTACGCCCAGGCCCGGAAGCTGCTGGGCCTGGAGGACACCGCCT |
| | | TCTTCAAGGGCCTGCGGTACGGCAAGGACAACGCCGAGGCCTCCAC |
| | | CCTGATGGAGATGAAGGCCTACCACGCCATCTCCCGGGCCCTGGAG |
| | | AAGGAGGGCCTGAAGGACAAGAAGTCCCCCCTGAACCTGTCCTCCG |
| | | AGCTGCAGGACGAGATCGGCACCGCCTTCTCCCTGTTCAAGACCGA |
| | | CGAGGACATCACCGGCCGGCTGAAGGACCGGGTGCAGCCCGAGAT |
| | | CCTGGAGGCCCTGCTGAAGCACATCTCCTTCGACAAGTTCGTGCAG |
| | | ATCTCCCTGAAGGCCCTGCGGCGGATCGTGCCCCTGATGGAGCAGG |
| | | GCAAGCGGTACGACGAGGCCTGCGCCGAGATCTACGGCGACCACT |
| | | ACGGCAAGAAGAACACCGAGGAGAAGATCTACCTGCCCCCCATCC |
| | | CCGCCGACGAGATCCGGAACCCCGTGGTGCTGCGGGCCCTGTCCCA |
| | | GGCCCGGAAGGTGATCAACGGCGTGGTGCGGCGGTACGGCTCCCCC |
| | | GCCCGGATCCACATCGAGACCGCCCGGGAGGTGGGCAAGTCCTTCA |
| | | AGGACCGGAAGGAGATCGAGAAGCGGCAGGAGGAGAACCGGAAG |
| | | GACCGGGAGAAGGCCGCCGCCAAGTTCCGGGAGTACTTCCCCAACT |
| | | TCGTGGGCGAGCCCAAGTCCAAGGACATCCTGAAGCTGCGGCTGTA |
| | | CGAGCAGCAGCACGGCAAGTGCCTGTACTCCGGCAAGGAGATCAA |
| | | CCTGGTGCGGCTGAACGAGAAGGGCTACGTGGAGATCGACCACGC |
| | | CCTGCCCTTCTCCCGGACCTGGGACGACTCCTTCAACAACAAGGTG |
| | | CTGGTGCTGGGCTCCGAGAACCAGAACAAGGGCAACCAGACCCCCT |
| | | ACGAGTACTTCAACGGCAAGGACAACTCCCGGGAGTGGCAGGAGT |
| | | TCAAGGCCCGGGTGGAGACCTCCCGGTTCCCCCGGTCCAAGAAGCA |
| | | GCGGATCCTGCTGCAGAAGTTCGACGAGGACGGCTTCAAGGAGTGC |
| | | AACCTGAACGACACCCGGTACGTGAACCGGTTCCTGTGCCAGTTCG |
| | | TGGCCGACCACATCCTGCTGACCGGCAAGGGCAAGCGGCGGGTGTT |
| | | CGCCTCCAACGGCCAGATCACCAACCTGCTGCGGGGCTTCTGGGGC |
| | | CTGCGGAAGGTGCGGGCCGAGAACGACCGGCACCACGCCCTGGAC |
| | | GCCGTGGTGGTGGCCTGCTCCACCGTGGCCATGCAGCAGAAGATCA |
| | | CCCGGTTCGTGCGGTACAAGGAGATGAACGCCTTCGACGGCAAGAC |
| | | CATCGACAAGGAGACCGGCAAGGTGCTGCACCAGAAGACCCACTT |
| | | CCCCCAGCCCTGGGAGTTCTTCGCCCAGGAGGTGATGATCCGGGTG |
| | | TTCGGCAAGCCCGACGGCAAGCCCGAGTTCGAGGAGGCCGACACC |
| | | CCCGAGAAGCTGCGGACCCTGCTGGCCGAGAAGCTGTCCTCCCGGC |
| | | CCGAGGCCGTGCACGAGTACGTGACCCCCCTGTTCGTGTCCCGGGC |
| | | CCCCAACCGGAAGATGTCCGGCGCCCACAAGGACACCCTGCGGTCC |
| | | GCCAAGCGGTTCGTGAAGCACAACGAGAAGATCTCCGTGAAGCGG |
| | | GTGTGGCTGACCGAGATCAAGCTGGCCGACCTGGAGAACATGGTGA |
| | | ACTACAAGAACGGCCGGGAGATCGAGCTGTACGAGGCCCTGAAGG |
| | | CCCGGCTGGAGGCCTACGGCGGCAACGCCAAGCAGGCCTTCGACCC |
| | | CAAGGACAACCCCTTCTACAAGAAGGGCGGCCAGCTGGTGAAGGC |
| | | CGTGCGGGTGGAGAAGACCCAGGAGTCCGGCGTGCTGCTGAACAA |
| | | GAAGAACGCCTACACCATCGCCGACAACGGCGACATGGTGCGGGT |
| | | GGACGTGTTCTGCAAGGTGGACAAGAAGGGCAAGAACCAGTACTT |
| | | CATCGTGCCCATCTACGCCTGGCAGGTGGCCGAGAACATCCTGCCC |
| | | GACATCGACTGCAAGGGCTACCGGATCGACGACTCCTACACCTTCT |
| | | GCTTCTCCCTGCACAAGTACGACCTGATCGCCTTCCAGAAGGACGA |
| | | GAAGTCCAAGGTGGAGTTCGCCTACTACATCAACTGCGACTCCTCC |
| | | AACGGCCGGTTCTACCTGGCCTGGCACGACAAGGGCTCCAAGGAGC |
| | | AGCAGTTCCGGATCTCCACCCAGAACCTGGTGCTGATCCAGAAGTA |
| | | CCAGGTGAACGAGCTGGGCAAGGAGATCCGGCCCTGCCGGCTGAA |
| | | GAAGCGGCCCCCCGTGCGGTCCGAGTCCGCCACCCCCGAGTCCGTG |
| | | TCCGGCTGGCGGCTGTTCAAGAAGATCTCCTAG |
| 187 | Open reading | atgGACGGCTCCGGCGGCGGCTCCCCCAAGAAGAAGCGGAAGGTGG |
| | frame for | GCGGCTCCGGCGGCGGCgccgccttcaagcccaaccccatcaactacatcctgggcctggacat |
| | Nme2Cas9 | cggcatcgcctccgtgggctgggccatggtggagatcgacgaggaggagaaccccatccggctgatcgacct |
| | encoded by | gggcgtgcgggtgttcgagcgggccgaggtgcccaagaccggcgactccctggccatggcccggcggctgg |
| | mRNA N | cccggtccgtgcggggctgacccggcggcgggcccaccggctgctgcgggcccggcggctgctgaagcg |
| | | ggagggcgtgctgcaggccgccgacttcgacgagaacggcctgatcaagtccctgcccaacaccccctggca |
| | | gctgcgggccgccgccctggaccggaagctgacccccctggagtggtccgccgtgctgctgcacctgatcaa |
| | | gcaccggggctacctgtcccagcggaagaacgagggcgagaccgccgacaaggagctgggcgccctgctg |
| | | aagggcgtggccaacaacgcccacgccctgcagaccggcgacttccggacccccgccgagctggccctgaa |
| | | caagttcgagaaggagtccggccacatccggaaccagcggggcgactactcccacaccttctcccggaagga |
| | | cctgcaggccgagctgatcctgctgttcgagaagcagaaggagttcggcaacccccacgtgtccggcggcctg |
| | | aaggagggcatcgagaccctgctgatgacccagcggcccgccctgtccggcgacgccgtgcagaagatgct |
| | | gggccactgcaccttcgagcccgccgagcccaaggccgccaagaacacctacaccgccgagcggttcatctg |
| | | gctgaccaagctgaacaacctgcggatcctggagcagggctccgagcggcccctgaccgacaccgagcggg |
| | | ccaccctgatggacgagccctaccggaagtccaagctgacctacgcccaggcccggaagctgctgggcctgg |
| | | aggacaccgccttcttcaagggcctgcggtacggcaaggacaacgccgaggcctccaccctgatggagatga |
| | | aggcctaccacgccatctcccgggccctggagaaggagggcctgaaggacaagaagtcccccctgaacctgt |
| | | cctccgagctgcaggacgagatcggcaccgccttctccctgttcaagaccgacgaggacatcaccggccggct |
| | | gaaggaccgggtgcagcccgagatcctggaggccctgctgaagcacatctccttcgacaagttcgtgcagatct |
| | | ccctgaaggccctgcggcggatcgtgcccctgatggagcagggcaagcggtacgacgaggcctgcgccgag |
| | | atctacggcgaccactacggcaagaagaacaccgaggagaagatctacctgccccccatccccgccgacgag |
| | | atccggaaccccgtggtgctgcgggccctgtcccaggcccggaaggtgatcaacggcgtggtgcggggtac |
| | | ggctcccccgcccggatccacatcgagaccgcccgggaggtgggcaagtccttcaaggaccggaaggagat |
| | | cgagaagcggcaggaggagaaccggaaggaccgggagaaggccgccgccaagttccgggagtacttcccc |
| | | aacttcgtgggcgagcccaagtccaaggacatcctgaagctgcggctgtacgagcagcagcacggcaagtgc |
| | | ctgtactccggcaaggagatcaacctggtgcggctgaacgagaagggctacgtggagatcgaccacgccctg |
| | | cccttctcccggacctgggacgactccttcaacaacaaggtgctggtgctgggctccgagaaccagaacaagg |
| | | gcaaccagaccccctacgagtacttcaacggcaaggacaactcccgggagtggcaggagttcaaggcccgg |
| | | gtggagacctcccggttcccccggtccaagaagcagcggatcctgctgcagaagttcgacgaggacggcttca |
| | | aggagtgcaacctgaacgacacccggtacgtgaaccggttcctgtgccagttcgtggccgaccacatcctgctg |
| | | accggcaagggcaagcggcgggtgttcgcctccaacggccagatcaccaacctgctgcggggcttctggggc |
| | | ctgcggaaggtgcgggccgagaacgaccggcaccacgccctggacgccgtggtggtggcctgctccaccgt |
| | | ggccatgcagcagaagatcacccggttcgtgcggtacaaggagatgaacgccttcgacggcaagaccatcga |
| | | caaggagaccggcaaggtgctgcaccagaagacccacttcccccagccctgggagttcttcgcccaggaggt |
| | | gatgatccgggtgttcggcaagcccgacggcaagcccgagttcgaggaggccgacacccccgagaagctgc |
| | | ggaccctgctggccgagaagctgtcctcccggcccgaggccgtgcacgagtacgtgacccccctgttcgtgtc |
| | | ccgggcccccaaccggaagatgtccggcgcccacaaggacaccctgcggtccgccaagcggttcgtgaagc |
| | | acaacgagaagatctccgtgaagcgggtgtggctgaccgagatcaagctggccgacctggagaacatggtga |
| | | actacaagaacggccgggagatcgagctgtacgaggccctgaaggcccggctggaggcctacggcggcaac |
| | | gccaagcaggccttcgaccccaaggacaaccccttctacaagaagggcggccagctggtgaaggccgtgcg |
| | | ggtggagaagacccaggagtccggcgtgctgctgaacaagaagaacgcctacaccatcgccgacaacggcg |
| | | acatggtgcgggtggacgtgttctgcaaggtggacaagaagggcaagaaccagtacttcatcgtgcccatctac |
| | | gcctggcaggtggccgagaacatcctgcccgacatcgactgcaagggctaccggatcgacgactcctacacct |
| | | tctgcttctccctgcacaagtacgacctgatcgccttccagaaggacgagaagtccaaggtggagttcgcctact |
| | | acatcaactgcgactcctccaacggccggttctacctggcctggcacgacaagggctccaaggagcagcagtt |
| | | ccggatctccacccagaacctggtgctgatccagaagtaccaggtgaacgagctgggcaaggagatccggcc |
| | | ctgccggctgaagaagcggccccccgtgcggTCCGGAAAGCGGACCGCCGACGGCT |
| | | CCGGAGGAGGAAGCCCCGCCGCCAAGAAGAAGAAGCTGGACtag |
| 188 | Open reading | atgGACGGCTCCGGCGGCGGCTCCCCCAAGAAGAAGCGGAAGGTGG |
| | frame for | AGGACAAGCGGCCCGCCGCCACCAAGAAGGCCGGCCAGGCCAAGA |
| | Nme2Cas9 | AGAAGAAGGGCGGCTCCGGCGGCGGCgccgccttcaagcccaaccccatcaactacat |
| | encoded by | cctgggcctggacatcggcatcgcctccgtgggctgggccatggtggagatcgacgaggaggagaaccccat |
| | mRNA O | ccggctgatcgacctgggcgtgcgggtgttcgagcgggccgaggtgcccaagaccggcgactccctggccat |
| | | ggcccggggctggcccggtccgtgcggcggctgacccggcgggggcccaccggctgctgcgggcccg |
| | | gcggctgctgaagcgggagggcgtgctgcaggccgccgacttcgacgagaacggcctgatcaagtccctgcc |
| | | caacaccccctggcagctgcgggccgccgccctggaccggaagctgacccccctggagtggtccgccgtgct |
| | | gctgcacctgatcaagcaccggggctacctgtcccagcggaagaacgagggcgagaccgccgacaaggag |
| | | ctgggcgccctgctgaagggcgtggccaacaacgcccacgccctgcagaccggcgacttccggacccccgc |
| | | cgagctggccctgaacaagttcgagaaggagtccggccacatccggaaccagcggggcgactactcccacac |
| | | cttctcccggaaggacctgcaggccgagctgatcctgctgttcgagaagcagaaggagttcggcaacccccac |
| | | gtgtccggcggcctgaaggagggcatcgagaccctgctgatgacccagcggcccgccctgtccggcgacgc |
| | | cgtgcagaagatgctgggccactgcaccttcgagcccgccgagcccaaggccgccaagaacacctacaccg |
| | | ccgagcggttcatctggctgaccaagctgaacaacctgcggatcctggagcagggctccgagcggcccctga |
| | | ccgacaccgagcgggccaccctgatggacgagccctaccggaagtccaagctgacctacgcccaggcccgg |
| | | aagctgctgggcctggaggacaccgccttcttcaagggcctgcggtacggcaaggacaacgccgaggcctcc |
| | | accctgatggagatgaaggcctaccacgccatctcccgggccctggagaaggagggcctgaaggacaagaa |
| | | gtcccccctgaacctgtcctccgagctgcaggacgagatcggcaccgccttctccctgttcaagaccgacgagg |
| | | acatcaccggccggctgaaggaccgggtgcagcccgagatcctggaggccctgctgaagcacatctccttcga |
| | | caagttcgtgcagatctccctgaaggccctgcggcggatcgtgcccctgatggagcagggcaagcggtacgac |
| | | gaggcctgcgccgagatctacggcgaccactacggcaagaagaacaccgaggagaagatctacctgccccc |
| | | catccccgccgacgagatccggaaccccgtggtgctgcgggccctgtcccaggcccggaaggtgatcaacgg |
| | | cgtggtgcggcggtacggctcccccgcccggatccacatcgagaccgcccgggaggtgggcaagtccttcaa |
| | | ggaccggaaggagatcgagaagcggcaggaggagaaccggaaggaccgggagaaggccgccgccaagtt |
| | | ccgggagtacttccccaacttcgtgggcgagcccaagtccaaggacatcctgaagctgcggctgtacgagcag |
| | | cagcacggcaagtgcctgtactccggcaaggagatcaacctggtgcggctgaacgagaagggctacgtggag |
| | | atcgaccacgccctgcccttctcccggacctgggacgactccttcaacaacaaggtgctggtgctgggctccga |
| | | gaaccagaacaagggcaaccagaccccctacgagtacttcaacggcaaggacaactcccgggagtggcagg |
| | | agttcaaggcccgggtggagacctcccggttcccccggtccaagaagcagcggatcctgctgcagaagttcga |
| | | cgaggacggcttcaaggagtgcaacctgaacgacacccggtacgtgaaccggttcctgtgccagttcgtggcc |
| | | gaccacatcctgctgaccggcaagggcaagcggcgggtgttcgcctccaacggccagatcaccaacctgctg |
| | | cggggcttctggggcctgcggaaggtgcgggccgagaacgaccggcaccacgccctggacgccgtggtggt |
| | | ggcctgctccaccgtggccatgcagcagaagatcacccggttcgtgcggtacaaggagatgaacgccttcgac |
| | | ggcaagaccatcgacaaggagaccggcaaggtgctgcaccagaagacccacttcccccagccctgggagttc |
| | | ttcgcccaggaggtgatgatccgggtgttcggcaagcccgacggcaagcccgagttcgaggaggccgacacc |
| | | cccgagaagctgcggaccctgctggccgagaagctgtcctcccggcccgaggccgtgcacgagtacgtgacc |
| | | cccctgttcgtgtcccgggcccccaaccggaagatgtccggcgcccacaaggacaccctgcggtccgccaag |
| | | cggttcgtgaagcacaacgagaagatctccgtgaagcgggtgtggctgaccgagatcaagctggccgacctg |
| | | gagaacatggtgaactacaagaacggccgggagatcgagctgtacgaggccctgaaggcccggctggaggc |
| | | ctacggcggcaacgccaagcaggccttcgaccccaaggacaaccccttctacaagaagggggccagctggt |
| | | gaaggccgtgcgggtggagaagacccaggagtccggcgtgctgctgaacaagaagaacgcctacaccatcg |
| | | ccgacaacggcgacatggtgcgggtggacgtgttctgcaaggtggacaagaagggcaagaaccagtacttcat |
| | | cgtgcccatctacgcctggcaggtggccgagaacatcctgcccgacatcgactgcaagggctaccggatcgac |
| | | gactcctacaccttctgcttctccctgcacaagtacgacctgatcgccttccagaaggacgagaagtccaaggtg |
| | | gagttcgcctactacatcaactgcgactcctccaacggccggttctacctggcctggcacgacaagggctccaa |
| | | ggagcagcagttccggatctccacccagaacctggtgctgatccagaagtaccaggtgaacgagctgggcaa |
| | | ggagatccggccctgccggctgaagaagcggccccccgtgcggtag |
| 189 | Open reading | atgGACGGCTCCGGCGGCGGCTCCCCCAAGAAGAAGCGGAAGGTGG |
| | frame for | AGGACAAGCGGCCCGCCGCCACCAAGAAGGCCGGCCAGGCCAAGA |
| | Nme2Cas9 with | AGAAGAAGGGCGGCTCCGGCGGCGGCGCCGCCTTCAAGCCCAACC |
| | HiBiT tag | CCATCAACTACATCCTGGGCCTGGACATCGGCATCGCCTCCGTGGG |
| | encoded by | CTGGGCCATGGTGGAGATCGACGAGGAGGAGAACCCCATCCGGCT |
| | mRNA P | GATCGACCTGGGCGTGCGGGTGTTCGAGCGGGCCGAGGTGCCCAAG |
| | | ACCGGCGACTCCCTGGCCATGGCCCGGCGGCTGGCCCGGTCCGTGC |
| | | GGCGGCTGACCCGGCGGCGGGCCCACCGGCTGCTGCGGGCCCGGC |
| | | GGCTGCTGAAGCGGGAGGGCGTGCTGCAGGCCGCCGACTTCGACG |
| | | AGAACGGCCTGATCAAGTCCCTGCCCAACACCCCCTGGCAGCTGCG |
| | | GGCCGCCGCCCTGGACCGGAAGCTGACCCCCCTGGAGTGGTCCGCC |
| | | GTGCTGCTGCACCTGATCAAGCACCGGGGCTACCTGTCCCAGCGGA |
| | | AGAACGAGGGCGAGACCGCCGACAAGGAGCTGGGCGCCCTGCTGA |
| | | AGGGCGTGGCCAACAACGCCCACGCCCTGCAGACCGGCGACTTCCG |
| | | GACCCCCGCCGAGCTGGCCCTGAACAAGTTCGAGAAGGAGTCCGGC |
| | | CACATCCGGAACCAGCGGGGCGACTACTCCCACACCTTCTCCCGGA |
| | | AGGACCTGCAGGCCGAGCTGATCCTGCTGTTCGAGAAGCAGAAGG |
| | | AGTTCGGCAACCCCCACGTGTCCGGCGGCCTGAAGGAGGGCATCGA |
| | | GACCCTGCTGATGACCCAGCGGCCCGCCCTGTCCGGCGACGCCGTG |
| | | CAGAAGATGCTGGGCCACTGCACCTTCGAGCCCGCCGAGCCCAAGG |
| | | CCGCCAAGAACACCTACACCGCCGAGCGGTTCATCTGGCTGACCAA |
| | | GCTGAACAACCTGCGGATCCTGGAGCAGGGCTCCGAGCGGCCCCTG |
| | | ACCGACACCGAGCGGGCCACCCTGATGGACGAGCCCTACCGGAAG |
| | | TCCAAGCTGACCTACGCCCAGGCCCGGAAGCTGCTGGGCCTGGAGG |
| | | ACACCGCCTTCTTCAAGGGCCTGCGGTACGGCAAGGACAACGCCGA |
| | | GGCCTCCACCCTGATGGAGATGAAGGCCTACCACGCCATCTCCCGG |
| | | GCCCTGGAGAAGGAGGGCCTGAAGGACAAGAAGTCCCCCCTGAAC |
| | | CTGTCCTCCGAGCTGCAGGACGAGATCGGCACCGCCTTCTCCCTGTT |
| | | CAAGACCGACGAGGACATCACCGGCCGGCTGAAGGACCGGGTGCA |
| | | GCCCGAGATCCTGGAGGCCCTGCTGAAGCACATCTCCTTCGACAAG |
| | | TTCGTGCAGATCTCCCTGAAGGCCCTGCGGCGGATCGTGCCCCTGA |
| | | TGGAGCAGGGCAAGCGGTACGACGAGGCCTGCGCCGAGATCTACG |
| | | GCGACCACTACGGCAAGAAGAACACCGAGGAGAAGATCTACCTGC |
| | | CCCCCATCCCCGCCGACGAGATCCGGAACCCCGTGGTGCTGCGGGC |
| | | CCTGTCCCAGGCCCGGAAGGTGATCAACGGCGTGGTGCGGCGGTAC |
| | | GGCTCCCCCGCCCGGATCCACATCGAGACCGCCCGGGAGGTGGGCA |
| | | AGTCCTTCAAGGACCGGAAGGAGATCGAGAAGCGGCAGGAGGAGA |
| | | ACCGGAAGGACCGGGAGAAGGCCGCCGCCAAGTTCCGGGAGTACT |
| | | TCCCCAACTTCGTGGGCGAGCCCAAGTCCAAGGACATCCTGAAGCT |
| | | GCGGCTGTACGAGCAGCAGCACGGCAAGTGCCTGTACTCCGGCAAG |
| | | GAGATCAACCTGGTGCGGCTGAACGAGAAGGGCTACGTGGAGATC |
| | | GACCACGCCCTGCCCTTCTCCCGGACCTGGGACGACTCCTTCAACA |
| | | ACAAGGTGCTGGTGCTGGGCTCCGAGAACCAGAACAAGGGCAACC |
| | | AGACCCCCTACGAGTACTTCAACGGCAAGGACAACTCCCGGGAGTG |
| | | GCAGGAGTTCAAGGCCCGGGTGGAGACCTCCCGGTTCCCCCGGTCC |
| | | AAGAAGCAGCGGATCCTGCTGCAGAAGTTCGACGAGGACGGCTTC |
| | | AAGGAGTGCAACCTGAACGACACCCGGTACGTGAACCGGTTCCTGT |
| | | GCCAGTTCGTGGCCGACCACATCCTGCTGACCGGCAAGGGCAAGCG |
| | | GCGGGTGTTCGCCTCCAACGGCCAGATCACCAACCTGCTGCGGGGC |
| | | TTCTGGGGCCTGCGGAAGGTGCGGGCCGAGAACGACCGGCACCAC |
| | | GCCCTGGACGCCGTGGTGGTGGCCTGCTCCACCGTGGCCATGCAGC |
| | | AGAAGATCACCCGGTTCGTGCGGTACAAGGAGATGAACGCCTTCGA |
| | | CGGCAAGACCATCGACAAGGAGACCGGCAAGGTGCTGCACCAGAA |
| | | GACCCACTTCCCCCAGCCCTGGGAGTTCTTCGCCCAGGAGGTGATG |
| | | ATCCGGGTGTTCGGCAAGCCCGACGGCAAGCCCGAGTTCGAGGAG |
| | | GCCGACACCCCCGAGAAGCTGCGGACCCTGCTGGCCGAGAAGCTGT |
| | | CCTCCCGGCCCGAGGCCGTGCACGAGTACGTGACCCCCCTGTTCGT |
| | | GTCCCGGGCCCCCAACCGGAAGATGTCCGGCGCCCACAAGGACACC |
| | | CTGCGGTCCGCCAAGCGGTTCGTGAAGCACAACGAGAAGATCTCCG |
| | | TGAAGCGGGTGTGGCTGACCGAGATCAAGCTGGCCGACCTGGAGA |
| | | ACATGGTGAACTACAAGAACGGCCGGGAGATCGAGCTGTACGAGG |
| | | CCCTGAAGGCCCGGCTGGAGGCCTACGGCGGCAACGCCAAGCAGG |
| | | CCTTCGACCCCAAGGACAACCCCTTCTACAAGAAGGGCGGCCAGCT |
| | | GGTGAAGGCCGTGCGGGTGGAGAAGACCCAGGAGTCCGGCGTGCT |
| | | GCTGAACAAGAAGAACGCCTACACCATCGCCGACAACGGCGACAT |
| | | GGTGCGGGTGGACGTGTTCTGCAAGGTGGACAAGAAGGGCAAGAA |
| | | CCAGTACTTCATCGTGCCCATCTACGCCTGGCAGGTGGCCGAGAAC |
| | | ATCCTGCCCGACATCGACTGCAAGGGCTACCGGATCGACGACTCCT |
| | | ACACCTTCTGCTTCTCCCTGCACAAGTACGACCTGATCGCCTTCCAG |
| | | AAGGACGAGAAGTCCAAGGTGGAGTTCGCCTACTACATCAACTGCG |
| | | ACTCCTCCAACGGCCGGTTCTACCTGGCCTGGCACGACAAGGGCTC |
| | | CAAGGAGCAGCAGTTCCGGATCTCCACCCAGAACCTGGTGCTGATC |
| | | CAGAAGTACCAGGTGAACGAGCTGGGCAAGGAGATCCGGCCCTGC |
| | | CGGCTGAAGAAGCGGCCCCCCGTGCGGTCCGAGTCCGCCACCCCCG |
| | | AGTCCGTGTCCGGCTGGCGGCTGTTCAAGAAGATCTCCTAG |
| 190 | Open reading | atgGACGGCTCCGGCGGCGGCTCCGAGGACAAGCGGCCCGCCGCCAC |
| | frame for | CAAGAAGGCCGGCCAGGCCAAGAAGAAGAAGGGCGGCTCCGGCGG |
| | Nme2Cas9 | CGGCgccgccttcaagcccaaccccatcaactacatcctgggcctggacatcggcatcgcctccgtgggct |
| | encoded by | gggccatggtggagatcgacgaggaggagaaccccatccggctgatcgacctgggcgtgcgggtgttcgagc |
| | mRNA Q | gggccgaggtgcccaagaccggcgactccctggccatggcccggcggctggcccggtccgtgcggcggct |
| | | gacccggcgggggcccaccggctgctgcgggcccggcggctgctgaagcgggagggcgtgctgcaggc |
| | | cgccgacttcgacgagaacggcctgatcaagtccctgcccaacaccccctggcagctgcgggccgccgccct |
| | | ggaccggaagctgacccccctggagtggtccgccgtgctgctgcacctgatcaagcaccggggctacctgtcc |
| | | cagcggaagaacgagggcgagaccgccgacaaggagctgggcgccctgctgaagggcgtggccaacaac |
| | | gcccacgccctgcagaccggcgacttccggacccccgccgagctggccctgaacaagttcgagaaggagtcc |
| | | ggccacatccggaaccagcggggcgactactcccacaccttctcccggaaggacctgcaggccgagctgatc |
| | | ctgctgttcgagaagcagaaggagttcggcaacccccacgtgtccggcggcctgaaggagggcatcgagacc |
| | | ctgctgatgacccagcggcccgccctgtccggcgacgccgtgcagaagatgctgggccactgcaccttcgag |
| | | cccgccgagcccaaggccgccaagaacacctacaccgccgagcggttcatctggctgaccaagctgaacaac |
| | | ctgcggatcctggagcagggctccgagcggcccctgaccgacaccgagcgggccaccctgatggacgagcc |
| | | ctaccggaagtccaagctgacctacgcccaggcccggaagctgctgggcctggaggacaccgccttcttcaag |
| | | ggcctgcggtacggcaaggacaacgccgaggcctccaccctgatggagatgaaggcctaccacgccatctcc |
| | | cgggccctggagaaggagggcctgaaggacaagaagtcccccctgaacctgtcctccgagctgcaggacga |
| | | gatcggcaccgccttctccctgttcaagaccgacgaggacatcaccggccggctgaaggaccgggtgcagcc |
| | | cgagatcctggaggccctgctgaagcacatctccttcgacaagttcgtgcagatctccctgaaggccctgcggc |
| | | ggatcgtgcccctgatggagcagggcaagcggtacgacgaggcctgcgccgagatctacggcgaccactac |
| | | ggcaagaagaacaccgaggagaagatctacctgccccccatccccgccgacgagatccggaaccccgtggt |
| | | gctgcgggccctgtcccaggcccggaaggtgatcaacggcgtggtgcggcggtacggctcccccgcccgga |
| | | tccacatcgagaccgcccgggaggtgggcaagtccttcaaggaccggaaggagatcgagaagcggcagga |
| | | ggagaaccggaaggaccgggagaaggccgccgccaagttccgggagtacttccccaacttcgtgggcgagc |
| | | ccaagtccaaggacatcctgaagctgcggctgtacgagcagcagcacggcaagtgcctgtactccggcaagg |
| | | agatcaacctggtgcggctgaacgagaagggctacgtggagatcgaccacgccctgcccttctcccggacctg |
| | | ggacgactccttcaacaacaaggtgctggtgctgggctccgagaaccagaacaagggcaaccagacccccta |
| | | cgagtacttcaacggcaaggacaactcccgggagtggcaggagttcaaggcccgggtggagacctcccggtt |
| | | cccccggtccaagaagcagcggatcctgctgcagaagttcgacgaggacggcttcaaggagtgcaacctgaa |
| | | cgacacccggtacgtgaaccggttcctgtgccagttcgtggccgaccacatcctgctgaccggcaagggcaag |
| | | cggcgggtgttcgcctccaacggccagatcaccaacctgctgcggggcttctggggcctgcggaaggtgcgg |
| | | gccgagaacgaccggcaccacgccctggacgccgtggtggtggcctgctccaccgtggccatgcagcagaa |
| | | gatcacccggttcgtgcggtacaaggagatgaacgccttcgacggcaagaccatcgacaaggagaccggcaa |
| | | ggtgctgcaccagaagacccacttcccccagccctgggagttcttcgcccaggaggtgatgatccgggtgttcg |
| | | gcaagcccgacggcaagcccgagttcgaggaggccgacacccccgagaagctgcggaccctgctggccga |
| | | gaagctgtcctcccggcccgaggccgtgcacgagtacgtgacccccctgttcgtgtcccgggcccccaaccgg |
| | | aagatgtccggcgcccacaaggacaccctgcggtccgccaagcggttcgtgaagcacaacgagaagatctcc |
| | | gtgaagcgggtgtggctgaccgagatcaagctggccgacctggagaacatggtgaactacaagaacggccgg |
| | | gagatcgagctgtacgaggccctgaaggcccggctggaggcctacggcggcaacgccaagcaggccttcga |
| | | ccccaaggacaaccccttctacaagaagggcggccagctggtgaaggccgtgcgggtggagaagacccagg |
| | | agtccggcgtgctgctgaacaagaagaacgcctacaccatcgccgacaacggcgacatggtgcgggtggacg |
| | | tgttctgcaaggtggacaagaagggcaagaaccagtacttcatcgtgcccatctacgcctggcaggtggccgag |
| | | aacatcctgcccgacatcgactgcaagggctaccggatcgacgactcctacaccttctgcttctccctgcacaag |
| | | tacgacctgatcgccttccagaaggacgagaagtccaaggtggagttcgcctactacatcaactgcgactcctcc |
| | | aacggccggttctacctggcctggcacgacaagggctccaaggagcagcagttccggatctccacccagaac |
| | | ctggtgctgatccagaagtaccaggtgaacgagctgggcaaggagatccggccctgccggctgaagaagcgg |
| | | ccccccgtgcggtag |
| 191 | Exemplary amino | MAAFKPNSINYILGLDIGIASVGWAMVEIDEEENPIRLIDLGVRVFERAE |
| | acid sequence of | VPKTGDSLAMARRLARSVRRLTRRRAHRLLRTRRLLKREGVLQAANF |
| | Nme1Cas9 | DENGLIKSLPNTPWQLRAAALDRKLTPLEWSAVLLHLIKHRGYLSQRK |
| | cleavase | NEGETADKELGALLKGVAGNAHALQTGDFRTPAELALNKFEKESGHI |
| | | RNQRSDYSHTFSRKDLQAELILLFEKQKEFGNPHVSGGLKEGIETLLMT |
| | | QRPALSGDAVQKMLGHCTFEPAEPKAAKNTYTAERFIWLTKLNNLRIL |
| | | EQGSERPLTDTERATLMDEPYRKSKLTYAQARKLLGLEDTAFFKGLRY |
| | | GKDNAEASTLMEMKAYHAISRALEKEGLKDKKSPLNLSPELQDEIGTA |
| | | FSLFKTDEDITGRLKDRIQPEILEALLKHISFDKFVQISLKALRRIVPLME |
| | | QGKRYDEACAEIYGDHYGKKNTEEKIYLPPIPADEIRNPVVLRALSQAR |
| | | KVINGVVRRYGSPARIHIETAREVGKSFKDRKEIEKRQEENRKDREKA |
| | | AAKFREYFPNFVGEPKSKDILKLRLYEQQHGKCLYSGKEINLGRLNEK |
| | | GYVEIDHALPFSRTWDDSFNNKVLVLGSENQNKGNQTPYEYFNGKDN |
| | | SREWQEFKARVETSRFPRSKKQRILLQKFDEDGFKERNLNDTRYVNRF |
| | | LCQFVADRMRLTGKGKKRVFASNGQITNLLRGFWGLRKVRAENDRH |
| | | HALDAVVVACSTVAMQQKITRFVRYKEMNAFDGKTIDKETGEVLHQ |
| | | KTHFPQPWEFFAQEVMIRVFGKPDGKPEFEEADTLEKLRTLLAEKLSSR |
| | | PEAVHEYVTPLFVSRAPNRKMSGQGHMETVKSAKRLDEGVSVLRVPL |
| | | TQLKLKDLEKMVNREREPKLYEALKARLEAHKDDPAKAFAEPFYKYD |
| | | KAGNRTQQVKAVRVEQVQKTGVWVRNHNGIADNATMVRVDVFEKG |
| | | DKYYLVPIYSWQVAKGILPDRAVVQGKDEEDWQLIDDSFNFKFSLHPN |
| | | DLVEVITKKARMFGYFASCHRGTGNINIRIHDLDHKIGKNGILEGIGVK |
| | | TALSFQKYQIDELGKEIRPCRLKKRPPVR |
| 192 | Exemplary | GCTGCTTTTAAGCCTAATTCTATTAATTATATTCTTGGTCTTGATATT |
| | coding sequence | GGTATTGCTTCTGTTGGTTGGGCTATGGTTGAGATTGATGAGGAGG |
| | encoding | AGAATCCTATTCGTCTTATTGATCTTGGTGTTCGTGTTTTTGAGCGT |
| | Nme1Cas9 | GCTGAGGTTCCTAAGACTGGTGATTCTCTTGCTATGGCTCGTCGTCT |
| | cleavase | TGCTCGTTCTGTTCGTCGTCTTACTCGTCGTCGTGCTCATCGTCTTCT |
| | | TCGTACTCGTCGTCTTCTTAAGCGTGAGGGTGTTCTTCAGGCTGCTA |
| | | ATTTTGATGAGAATGGTCTTATTAAGTCTCTTCCTAATACTCCTTGG |
| | | CAGCTTCGTGCTGCTGCTCTTGATCGTAAGCTTACTCCTCTTGAGTG |
| | | GTCTGCTGTTCTTCTTCATCTTATTAAGCATCGTGGTTATCTTTCTCA |
| | | GCGTAAGAATGAGGGTGAGACTGCTGATAAGGAGCTTGGTGCTCTT |
| | | CTTAAGGGTGTTGCTGGTAATGCTCATGCTCTTCAGACTGGTGATTT |
| | | TCGTACTCCTGCTGAGCTTGCTCTTAATAAGTTTGAGAAGGAGTCTG |
| | | GTCATATTCGTAATCAGCGTTCTGATTATTCTCATACTTTTTCTCGTA |
| | | AGGATCTTCAGGCTGAGCTTATTCTTCTTTTTGAGAAGCAGAAGGA |
| | | GTTTGGTAATCCTCATGTTTCTGGTGGTCTTAAGGAGGGTATTGAGA |
| | | CTCTTCTTATGACTCAGCGTCCTGCTCTTTCTGGTGATGCTGTTCAG |
| | | AAGATGCTTGGTCATTGTACTTTTGAGCCTGCTGAGCCTAAGGCTGC |
| | | TAAGAATACTTATACTGCTGAGCGTTTTATTTGGCTTACTAAGCTTA |
| | | ATAATCTTCGTATTCTTGAGCAGGGTTCTGAGCGTCCTCTTACTGAT |
| | | ACTGAGCGTGCTACTCTTATGGATGAGCCTTATCGTAAGTCTAAGCT |
| | | TACTTATGCTCAGGCTCGTAAGCTTCTTGGTCTTGAGGATACTGCTT |
| | | TTTTTAAGGGTCTTCGTTATGGTAAGGATAATGCTGAGGCTTCTACT |
| | | CTTATGGAGATGAAGGCTTATCATGCTATTTCTCGTGCTCTTGAGAA |
| | | GGAGGGTCTTAAGGATAAGAAGTCTCCTCTTAATCTTTCTCCTGAGC |
| | | TTCAGGATGAGATTGGTACTGCTTTTTCTCTTTTTAAGACTGATGAG |
| | | GATATTACTGGTCGTCTTAAGGATCGTATTCAGCCTGAGATTCTTGA |
| | | GGCTCTTCTTAAGCATATTTCTTTTGATAAGTTTGTTCAGATTTCTCT |
| | | TAAGGCTCTTCGTCGTATTGTTCCTCTTATGGAGCAGGGTAAGCGTT |
| | | ATGATGAGGCTTGTGCTGAGATTTATGGTGATCATTATGGTAAGAA |
| | | GAATACTGAGGAGAAGATTTATCTTCCTCCTATTCCTGCTGATGAGA |
| | | TTCGTAATCCTGTTGTTCTTCGTGCTCTTTCTCAGGCTCGTAAGGTTA |
| | | TTAATGGTGTTGTTCGTCGTTATGGTTCTCCTGCTCGTATTCATATTG |
| | | AGACTGCTCGTGAGGTTGGTAAGTCTTTTAAGGATCGTAAGGAGAT |
| | | TGAGAAGCGTCAGGAGGAGAATCGTAAGGATCGTGAGAAGGCTGC |
| | | TGCTAAGTTTCGTGAGTATTTTCCTAATTTTGTTGGTGAGCCTAAGT |
| | | CTAAGGATATTCTTAAGCTTCGTCTTTATGAGCAGCAGCATGGTAA |
| | | GTGTCTTTATTCTGGTAAGGAGATTAATCTTGGTCGTCTTAATGAGA |
| | | AGGGTTATGTTGAGATTGATCATGCTCTTCCTTTTTCTCGTACTTGG |
| | | GATGATTCTTTTAATAATAAGGTTCTTGTTCTTGGTTCTGAGAATCA |
| | | GAATAAGGGTAATCAGACTCCTTATGAGTATTTTAATGGTAAGGAT |
| | | AATTCTCGTGAGTGGCAGGAGTTTAAGGCTCGTGTTGAGACTTCTC |
| | | GTTTTCCTCGTTCTAAGAAGCAGCGTATTCTTCTTCAGAAGTTTGAT |
| | | GAGGATGGTTTTAAGGAGCGTAATCTTAATGATACTCGTTATGTTA |
| | | ATCGTTTTCTTTGTCAGTTTGTTGCTGATCGTATGCGTCTTACTGGTA |
| | | AGGGTAAGAAGCGTGTTTTTGCTTCTAATGGTCAGATTACTAATCTT |
| | | CTTCGTGGTTTTTGGGGTCTTCGTAAGGTTCGTGCTGAGAATGATCG |
| | | TCATCATGCTCTTGATGCTGTTGTTGTTGCTTGTTCTACTGTTGCTAT |
| | | GCAGCAGAAGATTACTCGTTTTGTTCGTTATAAGGAGATGAATGCT |
| | | TTTGATGGTAAGACTATTGATAAGGAGACTGGTGAGGTTCTTCATC |
| | | AGAAGACTCATTTTCCTCAGCCTTGGGAGTTTTTTGCTCAGGAGGTT |
| | | ATGATTCGTGTTTTTGGTAAGCCTGATGGTAAGCCTGAGTTTGAGGA |
| | | GGCTGATACTCTTGAGAAGCTTCGTACTCTTCTTGCTGAGAAGCTTT |
| | | CTTCTCGTCCTGAGGCTGTTCATGAGTATGTTACTCCTCTTTTTGTTT |
| | | CTCGTGCTCCTAATCGTAAGATGTCTGGTCAGGGTCATATGGAGAC |
| | | TGTTAAGTCTGCTAAGCGTCTTGATGAGGGTGTTTCTGTTCTTCGTG |
| | | TTCCTCTTACTCAGCTTAAGCTTAAGGATCTTGAGAAGATGGTTAAT |
| | | CGTGAGCGTGAGCCTAAGCTTTATGAGGCTCTTAAGGCTCGTCTTG |
| | | AGGCTCATAAGGATGATCCTGCTAAGGCTTTTGCTGAGCCTTTTTAT |
| | | AAGTATGATAAGGCTGGTAATCGTACTCAGCAGGTTAAGGCTGTTC |
| | | GTGTTGAGCAGGTTCAGAAGACTGGTGTTTGGGTTCGTAATCATAA |
| | | TGGTATTGCTGATAATGCTACTATGGTTCGTGTTGATGTTTTTGAGA |
| | | AGGGTGATAAGTATTATCTTGTTCCTATTTATTCTTGGCAGGTTGCT |
| | | AAGGGTATTCTTCCTGATCGTGCTGTTGTTCAGGGTAAGGATGAGG |
| | | AGGATTGGCAGCTTATTGATGATTCTTTTAATTTTAAGTTTTCTCTTC |
| | | ATCCTAATGATCTTGTTGAGGTTATTACTAAGAAGGCTCGTATGTTT |
| | | GGTTATTTTGCTTCTTGTCATCGTGGTACTGGTAATATTAATATTCGT |
| | | ATTCATGATCTTGATCATAAGATTGGTAAGAATGGTATTCTTGAGG |
| | | GTATTGGTGTTAAGACTGCTCTTTCTTTTCAGAAGTATCAGATTGAT |
| | | GAGCTTGGTAAGGAGATTCGTCCTTGTCGTCTTAAGAAGCGTCCTCC |
| | | TGTTCGT |
| 193 | Exemplary | GCCGCCTTCAAGCCCAACTCCATCAACTACATCCTGGGCCTGGACA |
| | coding sequence | TCGGCATCGCCTCCGTGGGCTGGGCCATGGTGGAGATCGACGAGGA |
| | encoding | GGAGAACCCCATCCGGCTGATCGACCTGGGCGTGCGGGTGTTCGAG |
| | Nme1Cas9 | CGGGCCGAGGTGCCCAAGACCGGCGACTCCCTGGCCATGGCCCGGC |
| | cleavase | GGCTGGCCCGGTCCGTGCGGCGGCTGACCCGGCGGCGGGCCCACCG |
| | | GCTGCTGCGGACCCGGCGGCTGCTGAAGCGGGAGGGCGTGCTGCA |
| | | GGCCGCCAACTTCGACGAGAACGGCCTGATCAAGTCCCTGCCCAAC |
| | | ACCCCCTGGCAGCTGCGGGCCGCCGCCCTGGACCGGAAGCTGACCC |
| | | CCCTGGAGTGGTCCGCCGTGCTGCTGCACCTGATCAAGCACCGGGG |
| | | CTACCTGTCCCAGCGGAAGAACGAGGGCGAGACCGCCGACAAGGA |
| | | GCTGGGCGCCCTGCTGAAGGGCGTGGCCGGCAACGCCCACGCCCTG |
| | | CAGACCGGCGACTTCCGGACCCCCGCCGAGCTGGCCCTGAACAAGT |
| | | TCGAGAAGGAGTCCGGCCACATCCGGAACCAGCGGTCCGACTACTC |
| | | CCACACCTTCTCCCGGAAGGACCTGCAGGCCGAGCTGATCCTGCTG |
| | | TTCGAGAAGCAGAAGGAGTTCGGCAACCCCCACGTGTCCGGCGGCC |
| | | TGAAGGAGGGCATCGAGACCCTGCTGATGACCCAGCGGCCCGCCCT |
| | | GTCCGGCGACGCCGTGCAGAAGATGCTGGGCCACTGCACCTTCGAG |
| | | CCCGCCGAGCCCAAGGCCGCCAAGAACACCTACACCGCCGAGCGG |
| | | TTCATCTGGCTGACCAAGCTGAACAACCTGCGGATCCTGGAGCAGG |
| | | GCTCCGAGCGGCCCCTGACCGACACCGAGCGGGCCACCCTGATGGA |
| | | CGAGCCCTACCGGAAGTCCAAGCTGACCTACGCCCAGGCCCGGAAG |
| | | CTGCTGGGCCTGGAGGACACCGCCTTCTTCAAGGGCCTGCGGTACG |
| | | GCAAGGACAACGCCGAGGCCTCCACCCTGATGGAGATGAAGGCCT |
| | | ACCACGCCATCTCCCGGGCCCTGGAGAAGGAGGGCCTGAAGGACA |
| | | AGAAGTCCCCCCTGAACCTGTCCCCCGAGCTGCAGGACGAGATCGG |
| | | CACCGCCTTCTCCCTGTTCAAGACCGACGAGGACATCACCGGCCGG |
| | | CTGAAGGACCGGATCCAGCCCGAGATCCTGGAGGCCCTGCTGAAGC |
| | | ACATCTCCTTCGACAAGTTCGTGCAGATCTCCCTGAAGGCCCTGCG |
| | | GCGGATCGTGCCCCTGATGGAGCAGGGCAAGCGGTACGACGAGGC |
| | | CTGCGCCGAGATCTACGGCGACCACTACGGCAAGAAGAACACCGA |
| | | GGAGAAGATCTACCTGCCCCCCATCCCCGCCGACGAGATCCGGAAC |
| | | CCCGTGGTGCTGCGGGCCCTGTCCCAGGCCCGGAAGGTGATCAACG |
| | | GCGTGGTGCGGCGGTACGGCTCCCCCGCCCGGATCCACATCGAGAC |
| | | CGCCCGGGAGGTGGGCAAGTCCTTCAAGGACCGGAAGGAGATCGA |
| | | GAAGCGGCAGGAGGAGAACCGGAAGGACCGGGAGAAGGCCGCCG |
| | | CCAAGTTCCGGGAGTACTTCCCCAACTTCGTGGGCGAGCCCAAGTC |
| | | CAAGGACATCCTGAAGCTGCGGCTGTACGAGCAGCAGCACGGCAA |
| | | GTGCCTGTACTCCGGCAAGGAGATCAACCTGGGCCGGCTGAACGAG |
| | | AAGGGCTACGTGGAGATCGACCACGCCCTGCCCTTCTCCCGGACCT |
| | | GGGACGACTCCTTCAACAACAAGGTGCTGGTGCTGGGCTCCGAGAA |
| | | CCAGAACAAGGGCAACCAGACCCCCTACGAGTACTTCAACGGCAA |
| | | GGACAACTCCCGGGAGTGGCAGGAGTTCAAGGCCCGGGTGGAGAC |
| | | CTCCCGGTTCCCCCGGTCCAAGAAGCAGCGGATCCTGCTGCAGAAG |
| | | TTCGACGAGGACGGCTTCAAGGAGCGGAACCTGAACGACACCCGG |
| | | TACGTGAACCGGTTCCTGTGCCAGTTCGTGGCCGACCGGATGCGGC |
| | | TGACCGGCAAGGGCAAGAAGCGGGTGTTCGCCTCCAACGGCCAGA |
| | | TCACCAACCTGCTGCGGGGCTTCTGGGGCCTGCGGAAGGTGCGGGC |
| | | CGAGAACGACCGGCACCACGCCCTGGACGCCGTGGTGGTGGCCTGC |
| | | TCCACCGTGGCCATGCAGCAGAAGATCACCCGGTTCGTGCGGTACA |
| | | AGGAGATGAACGCCTTCGACGGCAAGACCATCGACAAGGAGACCG |
| | | GCGAGGTGCTGCACCAGAAGACCCACTTCCCCCAGCCCTGGGAGTT |
| | | CTTCGCCCAGGAGGTGATGATCCGGGTGTTCGGCAAGCCCGACGGC |
| | | AAGCCCGAGTTCGAGGAGGCCGACACCCTGGAGAAGCTGCGGACC |
| | | CTGCTGGCCGAGAAGCTGTCCTCCCGGCCCGAGGCCGTGCACGAGT |
| | | ACGTGACCCCCCTGTTCGTGTCCCGGGCCCCCAACCGGAAGATGTC |
| | | CGGCCAGGGCCACATGGAGACCGTGAAGTCCGCCAAGCGGCTGGA |
| | | CGAGGGCGTGTCCGTGCTGCGGGTGCCCCTGACCCAGCTGAAGCTG |
| | | AAGGACCTGGAGAAGATGGTGAACCGGGAGCGGGAGCCCAAGCTG |
| | | TACGAGGCCCTGAAGGCCCGGCTGGAGGCCCACAAGGACGACCCC |
| | | GCCAAGGCCTTCGCCGAGCCCTTCTACAAGTACGACAAGGCCGGCA |
| | | ACCGGACCCAGCAGGTGAAGGCCGTGCGGGTGGAGCAGGTGCAGA |
| | | AGACCGGCGTGTGGGTGCGGAACCACAACGGCATCGCCGACAACG |
| | | CCACCATGGTGCGGGTGGACGTGTTCGAGAAGGGCGACAAGTACTA |
| | | CCTGGTGCCCATCTACTCCTGGCAGGTGGCCAAGGGCATCCTGCCC |
| | | GACCGGGCCGTGGTGCAGGGCAAGGACGAGGAGGACTGGCAGCTG |
| | | ATCGACGACTCCTTCAACTTCAAGTTCTCCCTGCACCCCAACGACCT |
| | | GGTGGAGGTGATCACCAAGAAGGCCCGGATGTTCGGCTACTTCGCC |
| | | TCCTGCCACCGGGGCACCGGCAACATCAACATCCGGATCCACGACC |
| | | TGGACCACAAGATCGGCAAGAACGGCATCCTGGAGGGCATCGGCG |
| | | TGAAGACCGCCCTGTCCTTCCAGAAGTACCAGATCGACGAGCTGGG |
| | | CAAGGAGATCCGGCCCTGCCGGCTGAAGAAGCGGCCCCCCGTGCG |
| | | G |
| 194 | Exemplary | GCAGCATTCAAACCAAACTCAATCAACTACATCCTAGGACTAGACA |
| | coding sequence | TCGGAATCGCATCAGTAGGATGAGCAATGGTAGAAATCGACGAAG |
| | encoding | AAGAAAACCCAATCCGACTAATCGACCTAGGAGTACGAGTATTCGA |
| | Nme1Cas9 | ACGAGCAGAAGTACCAAAAACAGGAGACTCACTAGCAATGGCACG |
| | cleavase | ACGACTAGCACGATCAGTACGACGACTAACACGACGACGAGCACA |
| | | CCGACTACTACGAACACGACGACTACTAAAACGAGAAGGAGTACT |
| | | ACAAGCAGCAAACTTCGACGAAAACGGACTAATCAAATCACTACC |
| | | AAACACACCATGACAACTACGAGCAGCAGCACTAGACCGAAAACT |
| | | AACACCACTAGAATGATCAGCAGTACTACTACACCTAATCAAACAC |
| | | CGAGGATACCTATCACAACGAAAAAACGAAGGAGAAACAGCAGAC |
| | | AAAGAACTAGGAGCACTACTAAAAGGAGTAGCAGGAAACGCACAC |
| | | GCACTACAAACAGGAGACTTCCGAACACCAGCAGAACTAGCACTA |
| | | AACAAATTCGAAAAAGAATCAGGACACATCCGAAACCAACGATCA |
| | | GACTACTCACACACATTCTCACGAAAAGACCTACAAGCAGAACTAA |
| | | TCCTACTATTCGAAAAACAAAAAGAATTCGGAAACCCACACGTATC |
| | | AGGAGGACTAAAAGAAGGAATCGAAACACTACTAATGACACAACG |
| | | ACCAGCACTATCAGGAGACGCAGTACAAAAAATGCTAGGACACTG |
| | | CACATTCGAACCAGCAGAACCAAAAGCAGCAAAAAACACATACAC |
| | | AGCAGAACGATTCATCTGACTAACAAAACTAAACAACCTACGAATC |
| | | CTAGAACAAGGATCAGAACGACCACTAACAGACACAGAACGAGCA |
| | | ACACTAATGGACGAACCATACCGAAAATCAAAACTAACATACGCA |
| | | CAAGCACGAAAACTACTAGGACTAGAAGACACAGCATTCTTCAAA |
| | | GGACTACGATACGGAAAAGACAACGCAGAAGCATCAACACTAATG |
| | | GAAATGAAAGCATACCACGCAATCTCACGAGCACTAGAAAAAGAA |
| | | GGACTAAAAGACAAAAAATCACCACTAAACCTATCACCAGAACTA |
| | | CAAGACGAAATCGGAACAGCATTCTCACTATTCAAAACAGACGAA |
| | | GACATCACAGGACGACTAAAAGACCGAATCCAACCAGAAATCCTA |
| | | GAAGCACTACTAAAACACATCTCATTCGACAAATTCGTACAAATCT |
| | | CACTAAAAGCACTACGACGAATCGTACCACTAATGGAACAAGGAA |
| | | AACGATACGACGAAGCATGCGCAGAAATCTACGGAGACCACTACG |
| | | GAAAAAAAAACACAGAAGAAAAAATCTACCTACCACCAATCCCAG |
| | | CAGACGAAATCCGAAACCCAGTAGTACTACGAGCACTATCACAAGC |
| | | ACGAAAAGTAATCAACGGAGTAGTACGACGATACGGATCACCAGC |
| | | ACGAATCCACATCGAAACAGCACGAGAAGTAGGAAAATCATTCAA |
| | | AGACCGAAAAGAAATCGAAAAACGACAAGAAGAAAACCGAAAAG |
| | | ACCGAGAAAAAGCAGCAGCAAAATTCCGAGAATACTTCCCAAACTT |
| | | CGTAGGAGAACCAAAATCAAAAGACATCCTAAAACTACGACTATA |
| | | CGAACAACAACACGGAAAATGCCTATACTCAGGAAAAGAAATCAA |
| | | CCTAGGACGACTAAACGAAAAAGGATACGTAGAAATCGACCACGC |
| | | ACTACCATTCTCACGAACATGAGACGACTCATTCAACAACAAAGTA |
| | | CTAGTACTAGGATCAGAAAACCAAAACAAAGGAAACCAAACACCA |
| | | TACGAATACTTCAACGGAAAAGACAACTCACGAGAATGACAAGAA |
| | | TTCAAAGCACGAGTAGAAACATCACGATTCCCACGATCAAAAAAAC |
| | | AACGAATCCTACTACAAAAATTCGACGAAGACGGATTCAAAGAAC |
| | | GAAACCTAAACGACACACGATACGTAAACCGATTCCTATGCCAATT |
| | | CGTAGCAGACCGAATGCGACTAACAGGAAAAGGAAAAAAACGAGT |
| | | ATTCGCATCAAACGGACAAATCACAAACCTACTACGAGGATTCTGA |
| | | GGACTACGAAAAGTACGAGCAGAAAACGACCGACACCACGCACTA |
| | | GACGCAGTAGTAGTAGCATGCTCAACAGTAGCAATGCAACAAAAA |
| | | ATCACACGATTCGTACGATACAAAGAAATGAACGCATTCGACGGAA |
| | | AAACAATCGACAAAGAAACAGGAGAAGTACTACACCAAAAAACAC |
| | | ACTTCCCACAACCATGAGAATTCTTCGCACAAGAAGTAATGATCCG |
| | | AGTATTCGGAAAACCAGACGGAAAACCAGAATTCGAAGAAGCAGA |
| | | CACACTAGAAAAACTACGAACACTACTAGCAGAAAAACTATCATCA |
| | | CGACCAGAAGCAGTACACGAATACGTAACACCACTATTCGTATCAC |
| | | GAGCACCAAACCGAAAAATGTCAGGACAAGGACACATGGAAACAG |
| | | TAAAATCAGCAAAACGACTAGACGAAGGAGTATCAGTACTACGAG |
| | | TACCACTAACACAACTAAAACTAAAAGACCTAGAAAAAATGGTAA |
| | | ACCGAGAACGAGAACCAAAACTATACGAAGCACTAAAAGCACGAC |
| | | TAGAAGCACACAAAGACGACCCAGCAAAAGCATTCGCAGAACCAT |
| | | TCTACAAATACGACAAAGCAGGAAACCGAACACAACAAGTAAAAG |
| | | CAGTACGAGTAGAACAAGTACAAAAAACAGGAGTATGAGTACGAA |
| | | ACCACAACGGAATCGCAGACAACGCAACAATGGTACGAGTAGACG |
| | | TATTCGAAAAAGGAGACAAATACTACCTAGTACCAATCTACTCATG |
| | | ACAAGTAGCAAAAGGAATCCTACCAGACCGAGCAGTAGTACAAGG |
| | | AAAAGACGAAGAAGACTGACAACTAATCGACGACTCATTCAACTTC |
| | | AAATTCTCACTACACCCAAACGACCTAGTAGAAGTAATCACAAAAA |
| | | AAGCACGAATGTTCGGATACTTCGCATCATGCCACCGAGGAACAGG |
| | | AAACATCAACATCCGAATCCACGACCTAGACCACAAAATCGGAAA |
| | | AAACGGAATCCTAGAAGGAATCGGAGTAAAAACAGCACTATCATT |
| | | CCAAAAATACCAAATCGACGAACTAGGAAAAGAAATCCGACCATG |
| | | CCGACTAAAAAAACGACCACCAGTACGA |
| 195 | Exemplary open | ATGGCTGCTTTTAAGCCTAATTCTATTAATTATATTCTTGGTCTTGAT |
| | reading frame for | ATTGGTATTGCTTCTGTTGGTTGGGCTATGGTTGAGATTGATGAGGA |
| | Nme1Cas9 | GGAGAATCCTATTCGTCTTATTGATCTTGGTGTTCGTGTTTTTGAGC |
| | cleavase | GTGCTGAGGTTCCTAAGACTGGTGATTCTCTTGCTATGGCTCGTCGT |
| | | CTTGCTCGTTCTGTTCGTCGTCTTACTCGTCGTCGTGCTCATCGTCTT |
| | | CTTCGTACTCGTCGTCTTCTTAAGCGTGAGGGTGTTCTTCAGGCTGC |
| | | TAATTTTGATGAGAATGGTCTTATTAAGTCTCTTCCTAATACTCCTT |
| | | GGCAGCTTCGTGCTGCTGCTCTTGATCGTAAGCTTACTCCTCTTGAG |
| | | TGGTCTGCTGTTCTTCTTCATCTTATTAAGCATCGTGGTTATCTTTCT |
| | | CAGCGTAAGAATGAGGGTGAGACTGCTGATAAGGAGCTTGGTGCTC |
| | | TTCTTAAGGGTGTTGCTGGTAATGCTCATGCTCTTCAGACTGGTGAT |
| | | TTTCGTACTCCTGCTGAGCTTGCTCTTAATAAGTTTGAGAAGGAGTC |
| | | TGGTCATATTCGTAATCAGCGTTCTGATTATTCTCATACTTTTTCTCG |
| | | TAAGGATCTTCAGGCTGAGCTTATTCTTCTTTTTGAGAAGCAGAAGG |
| | | AGTTTGGTAATCCTCATGTTTCTGGTGGTCTTAAGGAGGGTATTGAG |
| | | ACTCTTCTTATGACTCAGCGTCCTGCTCTTTCTGGTGATGCTGTTCA |
| | | GAAGATGCTTGGTCATTGTACTTTTGAGCCTGCTGAGCCTAAGGCTG |
| | | CTAAGAATACTTATACTGCTGAGCGTTTTATTTGGCTTACTAAGCTT |
| | | AATAATCTTCGTATTCTTGAGCAGGGTTCTGAGCGTCCTCTTACTGA |
| | | TACTGAGCGTGCTACTCTTATGGATGAGCCTTATCGTAAGTCTAAGC |
| | | TTACTTATGCTCAGGCTCGTAAGCTTCTTGGTCTTGAGGATACTGCT |
| | | TTTTTTAAGGGTCTTCGTTATGGTAAGGATAATGCTGAGGCTTCTAC |
| | | TCTTATGGAGATGAAGGCTTATCATGCTATTTCTCGTGCTCTTGAGA |
| | | AGGAGGGTCTTAAGGATAAGAAGTCTCCTCTTAATCTTTCTCCTGAG |
| | | CTTCAGGATGAGATTGGTACTGCTTTTTCTCTTTTTAAGACTGATGA |
| | | GGATATTACTGGTCGTCTTAAGGATCGTATTCAGCCTGAGATTCTTG |
| | | AGGCTCTTCTTAAGCATATTTCTTTTGATAAGTTTGTTCAGATTTCTC |
| | | TTAAGGCTCTTCGTCGTATTGTTCCTCTTATGGAGCAGGGTAAGCGT |
| | | TATGATGAGGCTTGTGCTGAGATTTATGGTGATCATTATGGTAAGA |
| | | AGAATACTGAGGAGAAGATTTATCTTCCTCCTATTCCTGCTGATGAG |
| | | ATTCGTAATCCTGTTGTTCTTCGTGCTCTTTCTCAGGCTCGTAAGGTT |
| | | ATTAATGGTGTTGTTCGTCGTTATGGTTCTCCTGCTCGTATTCATATT |
| | | GAGACTGCTCGTGAGGTTGGTAAGTCTTTTAAGGATCGTAAGGAGA |
| | | TTGAGAAGCGTCAGGAGGAGAATCGTAAGGATCGTGAGAAGGCTG |
| | | CTGCTAAGTTTCGTGAGTATTTTCCTAATTTTGTTGGTGAGCCTAAG |
| | | TCTAAGGATATTCTTAAGCTTCGTCTTTATGAGCAGCAGCATGGTAA |
| | | GTGTCTTTATTCTGGTAAGGAGATTAATCTTGGTCGTCTTAATGAGA |
| | | AGGGTTATGTTGAGATTGATCATGCTCTTCCTTTTTCTCGTACTTGG |
| | | GATGATTCTTTTAATAATAAGGTTCTTGTTCTTGGTTCTGAGAATCA |
| | | GAATAAGGGTAATCAGACTCCTTATGAGTATTTTAATGGTAAGGAT |
| | | AATTCTCGTGAGTGGCAGGAGTTTAAGGCTCGTGTTGAGACTTCTC |
| | | GTTTTCCTCGTTCTAAGAAGCAGCGTATTCTTCTTCAGAAGTTTGAT |
| | | GAGGATGGTTTTAAGGAGCGTAATCTTAATGATACTCGTTATGTTA |
| | | ATCGTTTTCTTTGTCAGTTTGTTGCTGATCGTATGCGTCTTACTGGTA |
| | | AGGGTAAGAAGCGTGTTTTTGCTTCTAATGGTCAGATTACTAATCTT |
| | | CTTCGTGGTTTTTGGGGTCTTCGTAAGGTTCGTGCTGAGAATGATCG |
| | | TCATCATGCTCTTGATGCTGTTGTTGTTGCTTGTTCTACTGTTGCTAT |
| | | GCAGCAGAAGATTACTCGTTTTGTTCGTTATAAGGAGATGAATGCT |
| | | TTTGATGGTAAGACTATTGATAAGGAGACTGGTGAGGTTCTTCATC |
| | | AGAAGACTCATTTTCCTCAGCCTTGGGAGTTTTTTGCTCAGGAGGTT |
| | | ATGATTCGTGTTTTTGGTAAGCCTGATGGTAAGCCTGAGTTTGAGGA |
| | | GGCTGATACTCTTGAGAAGCTTCGTACTCTTCTTGCTGAGAAGCTTT |
| | | CTTCTCGTCCTGAGGCTGTTCATGAGTATGTTACTCCTCTTTTTGTTT |
| | | CTCGTGCTCCTAATCGTAAGATGTCTGGTCAGGGTCATATGGAGAC |
| | | TGTTAAGTCTGCTAAGCGTCTTGATGAGGGTGTTTCTGTTCTTCGTG |
| | | TTCCTCTTACTCAGCTTAAGCTTAAGGATCTTGAGAAGATGGTTAAT |
| | | CGTGAGCGTGAGCCTAAGCTTTATGAGGCTCTTAAGGCTCGTCTTG |
| | | AGGCTCATAAGGATGATCCTGCTAAGGCTTTTGCTGAGCCTTTTTAT |
| | | AAGTATGATAAGGCTGGTAATCGTACTCAGCAGGTTAAGGCTGTTC |
| | | GTGTTGAGCAGGTTCAGAAGACTGGTGTTTGGGTTCGTAATCATAA |
| | | TGGTATTGCTGATAATGCTACTATGGTTCGTGTTGATGTTTTTGAGA |
| | | AGGGTGATAAGTATTATCTTGTTCCTATTTATTCTTGGCAGGTTGCT |
| | | AAGGGTATTCTTCCTGATCGTGCTGTTGTTCAGGGTAAGGATGAGG |
| | | AGGATTGGCAGCTTATTGATGATTCTTTTAATTTTAAGTTTTCTCTTC |
| | | ATCCTAATGATCTTGTTGAGGTTATTACTAAGAAGGCTCGTATGTTT |
| | | GGTTATTTTGCTTCTTGTCATCGTGGTACTGGTAATATTAATATTCGT |
| | | ATTCATGATCTTGATCATAAGATTGGTAAGAATGGTATTCTTGAGG |
| | | GTATTGGTGTTAAGACTGCTCTTTCTTTTCAGAAGTATCAGATTGAT |
| | | GAGCTTGGTAAGGAGATTCGTCCTTGTCGTCTTAAGAAGCGTCCTCC |
| | | TGTTCGTUGA |
| 196 | Exemplary open | ATGGCCGCCTTCAAGCCCAACTCCATCAACTACATCCTGGGCCTGG |
| | reading frame for | ACATCGGCATCGCCTCCGTGGGCTGGGCCATGGTGGAGATCGACGA |
| | Nme1Cas9 | GGAGGAGAACCCCATCCGGCTGATCGACCTGGGCGTGCGGGTGTTC |
| | cleavase | GAGCGGGCCGAGGTGCCCAAGACCGGCGACTCCCTGGCCATGGCCC |
| | | GGCGGCTGGCCCGGTCCGTGCGGCGGCTGACCCGGCGGCGGGCCCA |
| | | CCGGCTGCTGCGGACCCGGCGGCTGCTGAAGCGGGAGGGCGTGCTG |
| | | CAGGCCGCCAACTTCGACGAGAACGGCCTGATCAAGTCCCTGCCCA |
| | | ACACCCCCTGGCAGCTGCGGGCCGCCGCCCTGGACCGGAAGCTGAC |
| | | CCCCCTGGAGTGGTCCGCCGTGCTGCTGCACCTGATCAAGCACCGG |
| | | GGCTACCTGTCCCAGCGGAAGAACGAGGGCGAGACCGCCGACAAG |
| | | GAGCTGGGCGCCCTGCTGAAGGGCGTGGCCGGCAACGCCCACGCCC |
| | | TGCAGACCGGCGACTTCCGGACCCCCGCCGAGCTGGCCCTGAACAA |
| | | GTTCGAGAAGGAGTCCGGCCACATCCGGAACCAGCGGTCCGACTAC |
| | | TCCCACACCTTCTCCCGGAAGGACCTGCAGGCCGAGCTGATCCTGC |
| | | TGTTCGAGAAGCAGAAGGAGTTCGGCAACCCCCACGTGTCCGGCGG |
| | | CCTGAAGGAGGGCATCGAGACCCTGCTGATGACCCAGCGGCCCGCC |
| | | CTGTCCGGCGACGCCGTGCAGAAGATGCTGGGCCACTGCACCTTCG |
| | | AGCCCGCCGAGCCCAAGGCCGCCAAGAACACCTACACCGCCGAGC |
| | | GGTTCATCTGGCTGACCAAGCTGAACAACCTGCGGATCCTGGAGCA |
| | | GGGCTCCGAGCGGCCCCTGACCGACACCGAGCGGGCCACCCTGATG |
| | | GACGAGCCCTACCGGAAGTCCAAGCTGACCTACGCCCAGGCCCGGA |
| | | AGCTGCTGGGCCTGGAGGACACCGCCTTCTTCAAGGGCCTGCGGTA |
| | | CGGCAAGGACAACGCCGAGGCCTCCACCCTGATGGAGATGAAGGC |
| | | CTACCACGCCATCTCCCGGGCCCTGGAGAAGGAGGGCCTGAAGGAC |
| | | AAGAAGTCCCCCCTGAACCTGTCCCCCGAGCTGCAGGACGAGATCG |
| | | GCACCGCCTTCTCCCTGTTCAAGACCGACGAGGACATCACCGGCCG |
| | | GCTGAAGGACCGGATCCAGCCCGAGATCCTGGAGGCCCTGCTGAAG |
| | | CACATCTCCTTCGACAAGTTCGTGCAGATCTCCCTGAAGGCCCTGCG |
| | | GCGGATCGTGCCCCTGATGGAGCAGGGCAAGCGGTACGACGAGGC |
| | | CTGCGCCGAGATCTACGGCGACCACTACGGCAAGAAGAACACCGA |
| | | GGAGAAGATCTACCTGCCCCCCATCCCCGCCGACGAGATCCGGAAC |
| | | CCCGTGGTGCTGCGGGCCCTGTCCCAGGCCCGGAAGGTGATCAACG |
| | | GCGTGGTGCGGCGGTACGGCTCCCCCGCCCGGATCCACATCGAGAC |
| | | CGCCCGGGAGGTGGGCAAGTCCTTCAAGGACCGGAAGGAGATCGA |
| | | GAAGCGGCAGGAGGAGAACCGGAAGGACCGGGAGAAGGCCGCCG |
| | | CCAAGTTCCGGGAGTACTTCCCCAACTTCGTGGGCGAGCCCAAGTC |
| | | CAAGGACATCCTGAAGCTGCGGCTGTACGAGCAGCAGCACGGCAA |
| | | GTGCCTGTACTCCGGCAAGGAGATCAACCTGGGCCGGCTGAACGAG |
| | | AAGGGCTACGTGGAGATCGACCACGCCCTGCCCTTCTCCCGGACCT |
| | | GGGACGACTCCTTCAACAACAAGGTGCTGGTGCTGGGCTCCGAGAA |
| | | CCAGAACAAGGGCAACCAGACCCCCTACGAGTACTTCAACGGCAA |
| | | GGACAACTCCCGGGAGTGGCAGGAGTTCAAGGCCCGGGTGGAGAC |
| | | CTCCCGGTTCCCCCGGTCCAAGAAGCAGCGGATCCTGCTGCAGAAG |
| | | TTCGACGAGGACGGCTTCAAGGAGCGGAACCTGAACGACACCCGG |
| | | TACGTGAACCGGTTCCTGTGCCAGTTCGTGGCCGACCGGATGCGGC |
| | | TGACCGGCAAGGGCAAGAAGCGGGTGTTCGCCTCCAACGGCCAGA |
| | | TCACCAACCTGCTGCGGGGCTTCTGGGGCCTGCGGAAGGTGCGGGC |
| | | CGAGAACGACCGGCACCACGCCCTGGACGCCGTGGTGGTGGCCTGC |
| | | TCCACCGTGGCCATGCAGCAGAAGATCACCCGGTTCGTGCGGTACA |
| | | AGGAGATGAACGCCTTCGACGGCAAGACCATCGACAAGGAGACCG |
| | | GCGAGGTGCTGCACCAGAAGACCCACTTCCCCCAGCCCTGGGAGTT |
| | | CTTCGCCCAGGAGGTGATGATCCGGGTGTTCGGCAAGCCCGACGGC |
| | | AAGCCCGAGTTCGAGGAGGCCGACACCCTGGAGAAGCTGCGGACC |
| | | CTGCTGGCCGAGAAGCTGTCCTCCCGGCCCGAGGCCGTGCACGAGT |
| | | ACGTGACCCCCCTGTTCGTGTCCCGGGCCCCCAACCGGAAGATGTC |
| | | CGGCCAGGGCCACATGGAGACCGTGAAGTCCGCCAAGCGGCTGGA |
| | | CGAGGGCGTGTCCGTGCTGCGGGTGCCCCTGACCCAGCTGAAGCTG |
| | | AAGGACCTGGAGAAGATGGTGAACCGGGAGCGGGAGCCCAAGCTG |
| | | TACGAGGCCCTGAAGGCCCGGCTGGAGGCCCACAAGGACGACCCC |
| | | GCCAAGGCCTTCGCCGAGCCCTTCTACAAGTACGACAAGGCCGGCA |
| | | ACCGGACCCAGCAGGTGAAGGCCGTGCGGGTGGAGCAGGTGCAGA |
| | | AGACCGGCGTGTGGGTGCGGAACCACAACGGCATCGCCGACAACG |
| | | CCACCATGGTGCGGGTGGACGTGTTCGAGAAGGGCGACAAGTACTA |
| | | CCTGGTGCCCATCTACTCCTGGCAGGTGGCCAAGGGCATCCTGCCC |
| | | GACCGGGCCGTGGTGCAGGGCAAGGACGAGGAGGACTGGCAGCTG |
| | | ATCGACGACTCCTTCAACTTCAAGTTCTCCCTGCACCCCAACGACCT |
| | | GGTGGAGGTGATCACCAAGAAGGCCCGGATGTTCGGCTACTTCGCC |
| | | TCCTGCCACCGGGGCACCGGCAACATCAACATCCGGATCCACGACC |
| | | TGGACCACAAGATCGGCAAGAACGGCATCCTGGAGGGCATCGGCG |
| | | TGAAGACCGCCCTGTCCTTCCAGAAGTACCAGATCGACGAGCTGGG |
| | | CAAGGAGATCCGGCCCTGCCGGCTGAAGAAGCGGCCCCCCGTGCG |
| | | GUGA |
| 197 | Exemplary open | ATGGCAGCATTCAAACCAAACTCAATCAACTACATCCTAGGACTAG |
| | reading frame for | ACATCGGAATCGCATCAGTAGGATGAGCAATGGTAGAAATCGACG |
| | Nme1Cas9 | AAGAAGAAAACCCAATCCGACTAATCGACCTAGGAGTACGAGTATT |
| | cleavase | CGAACGAGCAGAAGTACCAAAAACAGGAGACTCACTAGCAATGGC |
| | | ACGACGACTAGCACGATCAGTACGACGACTAACACGACGACGAGC |
| | | ACACCGACTACTACGAACACGACGACTACTAAAACGAGAAGGAGT |
| | | ACTACAAGCAGCAAACTTCGACGAAAACGGACTAATCAAATCACTA |
| | | CCAAACACACCATGACAACTACGAGCAGCAGCACTAGACCGAAAA |
| | | CTAACACCACTAGAATGATCAGCAGTACTACTACACCTAATCAAAC |
| | | ACCGAGGATACCTATCACAACGAAAAAACGAAGGAGAAACAGCAG |
| | | ACAAAGAACTAGGAGCACTACTAAAAGGAGTAGCAGGAAACGCAC |
| | | ACGCACTACAAACAGGAGACTTCCGAACACCAGCAGAACTAGCAC |
| | | TAAACAAATTCGAAAAAGAATCAGGACACATCCGAAACCAACGAT |
| | | CAGACTACTCACACACATTCTCACGAAAAGACCTACAAGCAGAACT |
| | | AATCCTACTATTCGAAAAACAAAAAGAATTCGGAAACCCACACGTA |
| | | TCAGGAGGACTAAAAGAAGGAATCGAAACACTACTAATGACACAA |
| | | CGACCAGCACTATCAGGAGACGCAGTACAAAAAATGCTAGGACAC |
| | | TGCACATTCGAACCAGCAGAACCAAAAGCAGCAAAAAACACATAC |
| | | ACAGCAGAACGATTCATCTGACTAACAAAACTAAACAACCTACGAA |
| | | TCCTAGAACAAGGATCAGAACGACCACTAACAGACACAGAACGAG |
| | | CAACACTAATGGACGAACCATACCGAAAATCAAAACTAACATACG |
| | | CACAAGCACGAAAACTACTAGGACTAGAAGACACAGCATTCTTCAA |
| | | AGGACTACGATACGGAAAAGACAACGCAGAAGCATCAACACTAAT |
| | | GGAAATGAAAGCATACCACGCAATCTCACGAGCACTAGAAAAAGA |
| | | AGGACTAAAAGACAAAAAATCACCACTAAACCTATCACCAGAACT |
| | | ACAAGACGAAATCGGAACAGCATTCTCACTATTCAAAACAGACGA |
| | | AGACATCACAGGACGACTAAAAGACCGAATCCAACCAGAAATCCT |
| | | AGAAGCACTACTAAAACACATCTCATTCGACAAATTCGTACAAATC |
| | | TCACTAAAAGCACTACGACGAATCGTACCACTAATGGAACAAGGA |
| | | AAACGATACGACGAAGCATGCGCAGAAATCTACGGAGACCACTAC |
| | | GGAAAAAAAAACACAGAAGAAAAAATCTACCTACCACCAATCCCA |
| | | GCAGACGAAATCCGAAACCCAGTAGTACTACGAGCACTATCACAA |
| | | GCACGAAAAGTAATCAACGGAGTAGTACGACGATACGGATCACCA |
| | | GCACGAATCCACATCGAAACAGCACGAGAAGTAGGAAAATCATTC |
| | | AAAGACCGAAAAGAAATCGAAAAACGACAAGAAGAAAACCGAAA |
| | | AGACCGAGAAAAAGCAGCAGCAAAATTCCGAGAATACTTCCCAAA |
| | | CTTCGTAGGAGAACCAAAATCAAAAGACATCCTAAAACTACGACTA |
| | | TACGAACAACAACACGGAAAATGCCTATACTCAGGAAAAGAAATC |
| | | AACCTAGGACGACTAAACGAAAAAGGATACGTAGAAATCGACCAC |
| | | GCACTACCATTCTCACGAACATGAGACGACTCATTCAACAACAAAG |
| | | TACTAGTACTAGGATCAGAAAACCAAAACAAAGGAAACCAAACAC |
| | | CATACGAATACTTCAACGGAAAAGACAACTCACGAGAATGACAAG |
| | | AATTCAAAGCACGAGTAGAAACATCACGATTCCCACGATCAAAAA |
| | | AACAACGAATCCTACTACAAAAATTCGACGAAGACGGATTCAAAG |
| | | AACGAAACCTAAACGACACACGATACGTAAACCGATTCCTATGCCA |
| | | ATTCGTAGCAGACCGAATGCGACTAACAGGAAAAGGAAAAAAACG |
| | | AGTATTCGCATCAAACGGACAAATCACAAACCTACTACGAGGATTC |
| | | TGAGGACTACGAAAAGTACGAGCAGAAAACGACCGACACCACGCA |
| | | CTAGACGCAGTAGTAGTAGCATGCTCAACAGTAGCAATGCAACAAA |
| | | AAATCACACGATTCGTACGATACAAAGAAATGAACGCATTCGACGG |
| | | AAAAACAATCGACAAAGAAACAGGAGAAGTACTACACCAAAAAAC |
| | | ACACTTCCCACAACCATGAGAATTCTTCGCACAAGAAGTAATGATC |
| | | CGAGTATTCGGAAAACCAGACGGAAAACCAGAATTCGAAGAAGCA |
| | | GACACACTAGAAAAACTACGAACACTACTAGCAGAAAAACTATCA |
| | | TCACGACCAGAAGCAGTACACGAATACGTAACACCACTATTCGTAT |
| | | CACGAGCACCAAACCGAAAAATGTCAGGACAAGGACACATGGAAA |
| | | CAGTAAAATCAGCAAAACGACTAGACGAAGGAGTATCAGTACTAC |
| | | GAGTACCACTAACACAACTAAAACTAAAAGACCTAGAAAAAATGG |
| | | TAAACCGAGAACGAGAACCAAAACTATACGAAGCACTAAAAGCAC |
| | | GACTAGAAGCACACAAAGACGACCCAGCAAAAGCATTCGCAGAAC |
| | | CATTCTACAAATACGACAAAGCAGGAAACCGAACACAACAAGTAA |
| | | AAGCAGTACGAGTAGAACAAGTACAAAAAACAGGAGTATGAGTAC |
| | | GAAACCACAACGGAATCGCAGACAACGCAACAATGGTACGAGTAG |
| | | ACGTATTCGAAAAAGGAGACAAATACTACCTAGTACCAATCTACTC |
| | | ATGACAAGTAGCAAAAGGAATCCTACCAGACCGAGCAGTAGTACA |
| | | AGGAAAAGACGAAGAAGACTGACAACTAATCGACGACTCATTCAA |
| | | CTTCAAATTCTCACTACACCCAAACGACCTAGTAGAAGTAATCACA |
| | | AAAAAAGCACGAATGTTCGGATACTTCGCATCATGCCACCGAGGAA |
| | | CAGGAAACATCAACATCCGAATCCACGACCTAGACCACAAAATCG |
| | | GAAAAAACGGAATCCTAGAAGGAATCGGAGTAAAAACAGCACTAT |
| | | CATTCCAAAAATACCAAATCGACGAACTAGGAAAAGAAATCCGAC |
| | | CATGCCGACTAAAAAAACGACCACCAGTACGAUAA |
| 198 | Exemplary amino | MAAFKPNSINYILGLDIGIASVGWAMVEIDEEENPIRLIDLGVRVFERAE |
| | acid sequence of | VPKTGDSLAMARRLARSVRRLTRRRAHRLLRTRRLLKREGVLQAANF |
| | Nme1Cas9 HNH | DENGLIKSLPNTPWQLRAAALDRKLTPLEWSAVLLHLIKHRGYLSQRK |
| | nickase | NEGETADKELGALLKGVAGNAHALQTGDFRTPAELALNKFEKESGHI |
| | | RNQRSDYSHTFSRKDLQAELILLFEKQKEFGNPHVSGGLKEGIETLLMT |
| | | QRPALSGDAVQKMLGHCTFEPAEPKAAKNTYTAERFIWLTKLNNLRIL |
| | | EQGSERPLTDTERATLMDEPYRKSKLTYAQARKLLGLEDTAFFKGLRY |
| | | GKDNAEASTLMEMKAYHAISRALEKEGLKDKKSPLNLSPELQDEIGTA |
| | | FSLFKTDEDITGRLKDRIQPEILEALLKHISFDKFVQISLKALRRIVPLME |
| | | QGKRYDEACAEIYGDHYGKKNTEEKIYLPPIPADEIRNPVVLRALSQAR |
| | | KVINGVVRRYGSPARIHIETAREVGKSFKDRKEIEKRQEENRKDREKA |
| | | AAKFREYFPNFVGEPKSKDILKLRLYEQQHGKCLYSGKEINLGRLNEK |
| | | GYVEIDAALPFSRTWDDSFNNKVLVLGSENQNKGNQTPYEYFNGKDN |
| | | SREWQEFKARVETSRFPRSKKQRILLQKFDEDGFKERNLNDTRYVNRF |
| | | LCQFVADRMRLTGKGKKRVFASNGQITNLLRGFWGLRKVRAENDRH |
| | | HALDAVVVACSTVAMQQKITRFVRYKEMNAFDGKTIDKETGEVLHQ |
| | | KTHFPQPWEFFAQEVMIRVFGKPDGKPEFEEADTLEKLRTLLAEKLSSR |
| | | PEAVHEYVTPLFVSRAPNRKMSGQGHMETVKSAKRLDEGVSVLRVPL |
| | | TQLKLKDLEKMVNREREPKLYEALKARLEAHKDDPAKAFAEPFYKYD |
| | | KAGNRTQQVKAVRVEQVQKTGVWVRNHNGIADNATMVRVDVFEKG |
| | | DKYYLVPIYSWQVAKGILPDRAVVQGKDEEDWQLIDDSFNFKFSLHPN |
| | | DLVEVITKKARMFGYFASCHRGTGNINIRIHDLDHKIGKNGILEGIGVK |
| | | TALSFQKYQIDELGKEIRPCRLKKRPPVR |
| 199 | Exemplary | GCTGCTTTTAAGCCTAATTCTATTAATTATATTCTTGGTCTTGATATT |
| | coding sequence | GGTATTGCTTCTGTTGGTTGGGCTATGGTTGAGATTGATGAGGAGG |
| | encoding | AGAATCCTATTCGTCTTATTGATCTTGGTGTTCGTGTTTTTGAGCGT |
| | Nme1Cas9 HNH | GCTGAGGTTCCTAAGACTGGTGATTCTCTTGCTATGGCTCGTCGTCT |
| | nickase | TGCTCGTTCTGTTCGTCGTCTTACTCGTCGTCGTGCTCATCGTCTTCT |
| | | TCGTACTCGTCGTCTTCTTAAGCGTGAGGGTGTTCTTCAGGCTGCTA |
| | | ATTTTGATGAGAATGGTCTTATTAAGTCTCTTCCTAATACTCCTTGG |
| | | CAGCTTCGTGCTGCTGCTCTTGATCGTAAGCTTACTCCTCTTGAGTG |
| | | GTCTGCTGTTCTTCTTCATCTTATTAAGCATCGTGGTTATCTTTCTCA |
| | | GCGTAAGAATGAGGGTGAGACTGCTGATAAGGAGCTTGGTGCTCTT |
| | | CTTAAGGGTGTTGCTGGTAATGCTCATGCTCTTCAGACTGGTGATTT |
| | | TCGTACTCCTGCTGAGCTTGCTCTTAATAAGTTTGAGAAGGAGTCTG |
| | | GTCATATTCGTAATCAGCGTTCTGATTATTCTCATACTTTTTCTCGTA |
| | | AGGATCTTCAGGCTGAGCTTATTCTTCTTTTTGAGAAGCAGAAGGA |
| | | GTTTGGTAATCCTCATGTTTCTGGTGGTCTTAAGGAGGGTATTGAGA |
| | | CTCTTCTTATGACTCAGCGTCCTGCTCTTTCTGGTGATGCTGTTCAG |
| | | AAGATGCTTGGTCATTGTACTTTTGAGCCTGCTGAGCCTAAGGCTGC |
| | | TAAGAATACTTATACTGCTGAGCGTTTTATTTGGCTTACTAAGCTTA |
| | | ATAATCTTCGTATTCTTGAGCAGGGTTCTGAGCGTCCTCTTACTGAT |
| | | ACTGAGCGTGCTACTCTTATGGATGAGCCTTATCGTAAGTCTAAGCT |
| | | TACTTATGCTCAGGCTCGTAAGCTTCTTGGTCTTGAGGATACTGCTT |
| | | TTTTTAAGGGTCTTCGTTATGGTAAGGATAATGCTGAGGCTTCTACT |
| | | CTTATGGAGATGAAGGCTTATCATGCTATTTCTCGTGCTCTTGAGAA |
| | | GGAGGGTCTTAAGGATAAGAAGTCTCCTCTTAATCTTTCTCCTGAGC |
| | | TTCAGGATGAGATTGGTACTGCTTTTTCTCTTTTTAAGACTGATGAG |
| | | GATATTACTGGTCGTCTTAAGGATCGTATTCAGCCTGAGATTCTTGA |
| | | GGCTCTTCTTAAGCATATTTCTTTTGATAAGTTTGTTCAGATTTCTCT |
| | | TAAGGCTCTTCGTCGTATTGTTCCTCTTATGGAGCAGGGTAAGCGTT |
| | | ATGATGAGGCTTGTGCTGAGATTTATGGTGATCATTATGGTAAGAA |
| | | GAATACTGAGGAGAAGATTTATCTTCCTCCTATTCCTGCTGATGAGA |
| | | TTCGTAATCCTGTTGTTCTTCGTGCTCTTTCTCAGGCTCGTAAGGTTA |
| | | TTAATGGTGTTGTTCGTCGTTATGGTTCTCCTGCTCGTATTCATATTG |
| | | AGACTGCTCGTGAGGTTGGTAAGTCTTTTAAGGATCGTAAGGAGAT |
| | | TGAGAAGCGTCAGGAGGAGAATCGTAAGGATCGTGAGAAGGCTGC |
| | | TGCTAAGTTTCGTGAGTATTTTCCTAATTTTGTTGGTGAGCCTAAGT |
| | | CTAAGGATATTCTTAAGCTTCGTCTTTATGAGCAGCAGCATGGTAA |
| | | GTGTCTTTATTCTGGTAAGGAGATTAATCTTGGTCGTCTTAATGAGA |
| | | AGGGTTATGTTGAGATTGATGCTGCTCTTCCTTTTTCTCGTACTTGG |
| | | GATGATTCTTTTAATAATAAGGTTCTTGTTCTTGGTTCTGAGAATCA |
| | | GAATAAGGGTAATCAGACTCCTTATGAGTATTTTAATGGTAAGGAT |
| | | AATTCTCGTGAGTGGCAGGAGTTTAAGGCTCGTGTTGAGACTTCTC |
| | | GTTTTCCTCGTTCTAAGAAGCAGCGTATTCTTCTTCAGAAGTTTGAT |
| | | GAGGATGGTTTTAAGGAGCGTAATCTTAATGATACTCGTTATGTTA |
| | | ATCGTTTTCTTTGTCAGTTTGTTGCTGATCGTATGCGTCTTACTGGTA |
| | | AGGGTAAGAAGCGTGTTTTTGCTTCTAATGGTCAGATTACTAATCTT |
| | | CTTCGTGGTTTTTGGGGTCTTCGTAAGGTTCGTGCTGAGAATGATCG |
| | | TCATCATGCTCTTGATGCTGTTGTTGTTGCTTGTTCTACTGTTGCTAT |
| | | GCAGCAGAAGATTACTCGTTTTGTTCGTTATAAGGAGATGAATGCT |
| | | TTTGATGGTAAGACTATTGATAAGGAGACTGGTGAGGTTCTTCATC |
| | | AGAAGACTCATTTTCCTCAGCCTTGGGAGTTTTTTGCTCAGGAGGTT |
| | | ATGATTCGTGTTTTTGGTAAGCCTGATGGTAAGCCTGAGTTTGAGGA |
| | | GGCTGATACTCTTGAGAAGCTTCGTACTCTTCTTGCTGAGAAGCTTT |
| | | CTTCTCGTCCTGAGGCTGTTCATGAGTATGTTACTCCTCTTTTTGTTT |
| | | CTCGTGCTCCTAATCGTAAGATGTCTGGTCAGGGTCATATGGAGAC |
| | | TGTTAAGTCTGCTAAGCGTCTTGATGAGGGTGTTTCTGTTCTTCGTG |
| | | TTCCTCTTACTCAGCTTAAGCTTAAGGATCTTGAGAAGATGGTTAAT |
| | | CGTGAGCGTGAGCCTAAGCTTTATGAGGCTCTTAAGGCTCGTCTTG |
| | | AGGCTCATAAGGATGATCCTGCTAAGGCTTTTGCTGAGCCTTTTTAT |
| | | AAGTATGATAAGGCTGGTAATCGTACTCAGCAGGTTAAGGCTGTTC |
| | | GTGTTGAGCAGGTTCAGAAGACTGGTGTTTGGGTTCGTAATCATAA |
| | | TGGTATTGCTGATAATGCTACTATGGTTCGTGTTGATGTTTTTGAGA |
| | | AGGGTGATAAGTATTATCTTGTTCCTATTTATTCTTGGCAGGTTGCT |
| | | AAGGGTATTCTTCCTGATCGTGCTGTTGTTCAGGGTAAGGATGAGG |
| | | AGGATTGGCAGCTTATTGATGATTCTTTTAATTTTAAGTTTTCTCTTC |
| | | ATCCTAATGATCTTGTTGAGGTTATTACTAAGAAGGCTCGTATGTTT |
| | | GGTTATTTTGCTTCTTGTCATCGTGGTACTGGTAATATTAATATTCGT |
| | | ATTCATGATCTTGATCATAAGATTGGTAAGAATGGTATTCTTGAGG |
| | | GTATTGGTGTTAAGACTGCTCTTTCTTTTCAGAAGTATCAGATTGAT |
| | | GAGCTTGGTAAGGAGATTCGTCCTTGTCGTCTTAAGAAGCGTCCTCC |
| | | TGTTCGT |
| 200 | Exemplary | GCCGCCTTCAAGCCCAACTCCATCAACTACATCCTGGGCCTGGACA |
| | coding sequence | TCGGCATCGCCTCCGTGGGCTGGGCCATGGTGGAGATCGACGAGGA |
| | encoding | GGAGAACCCCATCCGGCTGATCGACCTGGGCGTGCGGGTGTTCGAG |
| | Nme1Cas9 HNH | CGGGCCGAGGTGCCCAAGACCGGCGACTCCCTGGCCATGGCCCGGC |
| | nickase | GGCTGGCCCGGTCCGTGCGGCGGCTGACCCGGCGGCGGGCCCACCG |
| | | GCTGCTGCGGACCCGGCGGCTGCTGAAGCGGGAGGGCGTGCTGCA |
| | | GGCCGCCAACTTCGACGAGAACGGCCTGATCAAGTCCCTGCCCAAC |
| | | ACCCCCTGGCAGCTGCGGGCCGCCGCCCTGGACCGGAAGCTGACCC |
| | | CCCTGGAGTGGTCCGCCGTGCTGCTGCACCTGATCAAGCACCGGGG |
| | | CTACCTGTCCCAGCGGAAGAACGAGGGCGAGACCGCCGACAAGGA |
| | | GCTGGGCGCCCTGCTGAAGGGCGTGGCCGGCAACGCCCACGCCCTG |
| | | CAGACCGGCGACTTCCGGACCCCCGCCGAGCTGGCCCTGAACAAGT |
| | | TCGAGAAGGAGTCCGGCCACATCCGGAACCAGCGGTCCGACTACTC |
| | | CCACACCTTCTCCCGGAAGGACCTGCAGGCCGAGCTGATCCTGCTG |
| | | TTCGAGAAGCAGAAGGAGTTCGGCAACCCCCACGTGTCCGGCGGCC |
| | | TGAAGGAGGGCATCGAGACCCTGCTGATGACCCAGCGGCCCGCCCT |
| | | GTCCGGCGACGCCGTGCAGAAGATGCTGGGCCACTGCACCTTCGAG |
| | | CCCGCCGAGCCCAAGGCCGCCAAGAACACCTACACCGCCGAGCGG |
| | | TTCATCTGGCTGACCAAGCTGAACAACCTGCGGATCCTGGAGCAGG |
| | | GCTCCGAGCGGCCCCTGACCGACACCGAGCGGGCCACCCTGATGGA |
| | | CGAGCCCTACCGGAAGTCCAAGCTGACCTACGCCCAGGCCCGGAAG |
| | | CTGCTGGGCCTGGAGGACACCGCCTTCTTCAAGGGCCTGCGGTACG |
| | | GCAAGGACAACGCCGAGGCCTCCACCCTGATGGAGATGAAGGCCT |
| | | ACCACGCCATCTCCCGGGCCCTGGAGAAGGAGGGCCTGAAGGACA |
| | | AGAAGTCCCCCCTGAACCTGTCCCCCGAGCTGCAGGACGAGATCGG |
| | | CACCGCCTTCTCCCTGTTCAAGACCGACGAGGACATCACCGGCCGG |
| | | CTGAAGGACCGGATCCAGCCCGAGATCCTGGAGGCCCTGCTGAAGC |
| | | ACATCTCCTTCGACAAGTTCGTGCAGATCTCCCTGAAGGCCCTGCG |
| | | GCGGATCGTGCCCCTGATGGAGCAGGGCAAGCGGTACGACGAGGC |
| | | CTGCGCCGAGATCTACGGCGACCACTACGGCAAGAAGAACACCGA |
| | | GGAGAAGATCTACCTGCCCCCCATCCCCGCCGACGAGATCCGGAAC |
| | | CCCGTGGTGCTGCGGGCCCTGTCCCAGGCCCGGAAGGTGATCAACG |
| | | GCGTGGTGCGGCGGTACGGCTCCCCCGCCCGGATCCACATCGAGAC |
| | | CGCCCGGGAGGTGGGCAAGTCCTTCAAGGACCGGAAGGAGATCGA |
| | | GAAGCGGCAGGAGGAGAACCGGAAGGACCGGGAGAAGGCCGCCG |
| | | CCAAGTTCCGGGAGTACTTCCCCAACTTCGTGGGCGAGCCCAAGTC |
| | | CAAGGACATCCTGAAGCTGCGGCTGTACGAGCAGCAGCACGGCAA |
| | | GTGCCTGTACTCCGGCAAGGAGATCAACCTGGGCCGGCTGAACGAG |
| | | AAGGGCTACGTGGAGATCGACGCCGCCCTGCCCTTCTCCCGGACCT |
| | | GGGACGACTCCTTCAACAACAAGGTGCTGGTGCTGGGCTCCGAGAA |
| | | CCAGAACAAGGGCAACCAGACCCCCTACGAGTACTTCAACGGCAA |
| | | GGACAACTCCCGGGAGTGGCAGGAGTTCAAGGCCCGGGTGGAGAC |
| | | CTCCCGGTTCCCCCGGTCCAAGAAGCAGCGGATCCTGCTGCAGAAG |
| | | TTCGACGAGGACGGCTTCAAGGAGCGGAACCTGAACGACACCCGG |
| | | TACGTGAACCGGTTCCTGTGCCAGTTCGTGGCCGACCGGATGCGGC |
| | | TGACCGGCAAGGGCAAGAAGCGGGTGTTCGCCTCCAACGGCCAGA |
| | | TCACCAACCTGCTGCGGGGCTTCTGGGGCCTGCGGAAGGTGCGGGC |
| | | CGAGAACGACCGGCACCACGCCCTGGACGCCGTGGTGGTGGCCTGC |
| | | TCCACCGTGGCCATGCAGCAGAAGATCACCCGGTTCGTGCGGTACA |
| | | AGGAGATGAACGCCTTCGACGGCAAGACCATCGACAAGGAGACCG |
| | | GCGAGGTGCTGCACCAGAAGACCCACTTCCCCCAGCCCTGGGAGTT |
| | | CTTCGCCCAGGAGGTGATGATCCGGGTGTTCGGCAAGCCCGACGGC |
| | | AAGCCCGAGTTCGAGGAGGCCGACACCCTGGAGAAGCTGCGGACC |
| | | CTGCTGGCCGAGAAGCTGTCCTCCCGGCCCGAGGCCGTGCACGAGT |
| | | ACGTGACCCCCCTGTTCGTGTCCCGGGCCCCCAACCGGAAGATGTC |
| | | CGGCCAGGGCCACATGGAGACCGTGAAGTCCGCCAAGCGGCTGGA |
| | | CGAGGGCGTGTCCGTGCTGCGGGTGCCCCTGACCCAGCTGAAGCTG |
| | | AAGGACCTGGAGAAGATGGTGAACCGGGAGCGGGAGCCCAAGCTG |
| | | TACGAGGCCCTGAAGGCCCGGCTGGAGGCCCACAAGGACGACCCC |
| | | GCCAAGGCCTTCGCCGAGCCCTTCTACAAGTACGACAAGGCCGGCA |
| | | ACCGGACCCAGCAGGTGAAGGCCGTGCGGGTGGAGCAGGTGCAGA |
| | | AGACCGGCGTGTGGGTGCGGAACCACAACGGCATCGCCGACAACG |
| | | CCACCATGGTGCGGGTGGACGTGTTCGAGAAGGGCGACAAGTACTA |
| | | CCTGGTGCCCATCTACTCCTGGCAGGTGGCCAAGGGCATCCTGCCC |
| | | GACCGGGCCGTGGTGCAGGGCAAGGACGAGGAGGACTGGCAGCTG |
| | | ATCGACGACTCCTTCAACTTCAAGTTCTCCCTGCACCCCAACGACCT |
| | | GGTGGAGGTGATCACCAAGAAGGCCCGGATGTTCGGCTACTTCGCC |
| | | TCCTGCCACCGGGGCACCGGCAACATCAACATCCGGATCCACGACC |
| | | TGGACCACAAGATCGGCAAGAACGGCATCCTGGAGGGCATCGGCG |
| | | TGAAGACCGCCCTGTCCTTCCAGAAGTACCAGATCGACGAGCTGGG |
| | | CAAGGAGATCCGGCCCTGCCGGCTGAAGAAGCGGCCCCCCGTGCG |
| | | G |
| 201 | Exemplary | GCAGCATTCAAACCAAACTCAATCAACTACATCCTAGGACTAGACA |
| | coding sequence | TCGGAATCGCATCAGTAGGATGAGCAATGGTAGAAATCGACGAAG |
| | encoding | AAGAAAACCCAATCCGACTAATCGACCTAGGAGTACGAGTATTCGA |
| | Nme1Cas9 HNH | ACGAGCAGAAGTACCAAAAACAGGAGACTCACTAGCAATGGCACG |
| | nickase | ACGACTAGCACGATCAGTACGACGACTAACACGACGACGAGCACA |
| | | CCGACTACTACGAACACGACGACTACTAAAACGAGAAGGAGTACT |
| | | ACAAGCAGCAAACTTCGACGAAAACGGACTAATCAAATCACTACC |
| | | AAACACACCATGACAACTACGAGCAGCAGCACTAGACCGAAAACT |
| | | AACACCACTAGAATGATCAGCAGTACTACTACACCTAATCAAACAC |
| | | CGAGGATACCTATCACAACGAAAAAACGAAGGAGAAACAGCAGAC |
| | | AAAGAACTAGGAGCACTACTAAAAGGAGTAGCAGGAAACGCACAC |
| | | GCACTACAAACAGGAGACTTCCGAACACCAGCAGAACTAGCACTA |
| | | AACAAATTCGAAAAAGAATCAGGACACATCCGAAACCAACGATCA |
| | | GACTACTCACACACATTCTCACGAAAAGACCTACAAGCAGAACTAA |
| | | TCCTACTATTCGAAAAACAAAAAGAATTCGGAAACCCACACGTATC |
| | | AGGAGGACTAAAAGAAGGAATCGAAACACTACTAATGACACAACG |
| | | ACCAGCACTATCAGGAGACGCAGTACAAAAAATGCTAGGACACTG |
| | | CACATTCGAACCAGCAGAACCAAAAGCAGCAAAAAACACATACAC |
| | | AGCAGAACGATTCATCTGACTAACAAAACTAAACAACCTACGAATC |
| | | CTAGAACAAGGATCAGAACGACCACTAACAGACACAGAACGAGCA |
| | | ACACTAATGGACGAACCATACCGAAAATCAAAACTAACATACGCA |
| | | CAAGCACGAAAACTACTAGGACTAGAAGACACAGCATTCTTCAAA |
| | | GGACTACGATACGGAAAAGACAACGCAGAAGCATCAACACTAATG |
| | | GAAATGAAAGCATACCACGCAATCTCACGAGCACTAGAAAAAGAA |
| | | GGACTAAAAGACAAAAAATCACCACTAAACCTATCACCAGAACTA |
| | | CAAGACGAAATCGGAACAGCATTCTCACTATTCAAAACAGACGAA |
| | | GACATCACAGGACGACTAAAAGACCGAATCCAACCAGAAATCCTA |
| | | GAAGCACTACTAAAACACATCTCATTCGACAAATTCGTACAAATCT |
| | | CACTAAAAGCACTACGACGAATCGTACCACTAATGGAACAAGGAA |
| | | AACGATACGACGAAGCATGCGCAGAAATCTACGGAGACCACTACG |
| | | GAAAAAAAAACACAGAAGAAAAAATCTACCTACCACCAATCCCAG |
| | | CAGACGAAATCCGAAACCCAGTAGTACTACGAGCACTATCACAAGC |
| | | ACGAAAAGTAATCAACGGAGTAGTACGACGATACGGATCACCAGC |
| | | ACGAATCCACATCGAAACAGCACGAGAAGTAGGAAAATCATTCAA |
| | | AGACCGAAAAGAAATCGAAAAACGACAAGAAGAAAACCGAAAAG |
| | | ACCGAGAAAAAGCAGCAGCAAAATTCCGAGAATACTTCCCAAACTT |
| | | CGTAGGAGAACCAAAATCAAAAGACATCCTAAAACTACGACTATA |
| | | CGAACAACAACACGGAAAATGCCTATACTCAGGAAAAGAAATCAA |
| | | CCTAGGACGACTAAACGAAAAAGGATACGTAGAAATCGACGCAGC |
| | | ACTACCATTCTCACGAACATGAGACGACTCATTCAACAACAAAGTA |
| | | CTAGTACTAGGATCAGAAAACCAAAACAAAGGAAACCAAACACCA |
| | | TACGAATACTTCAACGGAAAAGACAACTCACGAGAATGACAAGAA |
| | | TTCAAAGCACGAGTAGAAACATCACGATTCCCACGATCAAAAAAAC |
| | | AACGAATCCTACTACAAAAATTCGACGAAGACGGATTCAAAGAAC |
| | | GAAACCTAAACGACACACGATACGTAAACCGATTCCTATGCCAATT |
| | | CGTAGCAGACCGAATGCGACTAACAGGAAAAGGAAAAAAACGAGT |
| | | ATTCGCATCAAACGGACAAATCACAAACCTACTACGAGGATTCTGA |
| | | GGACTACGAAAAGTACGAGCAGAAAACGACCGACACCACGCACTA |
| | | GACGCAGTAGTAGTAGCATGCTCAACAGTAGCAATGCAACAAAAA |
| | | ATCACACGATTCGTACGATACAAAGAAATGAACGCATTCGACGGAA |
| | | AAACAATCGACAAAGAAACAGGAGAAGTACTACACCAAAAAACAC |
| | | ACTTCCCACAACCATGAGAATTCTTCGCACAAGAAGTAATGATCCG |
| | | AGTATTCGGAAAACCAGACGGAAAACCAGAATTCGAAGAAGCAGA |
| | | CACACTAGAAAAACTACGAACACTACTAGCAGAAAAACTATCATCA |
| | | CGACCAGAAGCAGTACACGAATACGTAACACCACTATTCGTATCAC |
| | | GAGCACCAAACCGAAAAATGTCAGGACAAGGACACATGGAAACAG |
| | | TAAAATCAGCAAAACGACTAGACGAAGGAGTATCAGTACTACGAG |
| | | TACCACTAACACAACTAAAACTAAAAGACCTAGAAAAAATGGTAA |
| | | ACCGAGAACGAGAACCAAAACTATACGAAGCACTAAAAGCACGAC |
| | | TAGAAGCACACAAAGACGACCCAGCAAAAGCATTCGCAGAACCAT |
| | | TCTACAAATACGACAAAGCAGGAAACCGAACACAACAAGTAAAAG |
| | | CAGTACGAGTAGAACAAGTACAAAAAACAGGAGTATGAGTACGAA |
| | | ACCACAACGGAATCGCAGACAACGCAACAATGGTACGAGTAGACG |
| | | TATTCGAAAAAGGAGACAAATACTACCTAGTACCAATCTACTCATG |
| | | ACAAGTAGCAAAAGGAATCCTACCAGACCGAGCAGTAGTACAAGG |
| | | AAAAGACGAAGAAGACTGACAACTAATCGACGACTCATTCAACTTC |
| | | AAATTCTCACTACACCCAAACGACCTAGTAGAAGTAATCACAAAAA |
| | | AAGCACGAATGTTCGGATACTTCGCATCATGCCACCGAGGAACAGG |
| | | AAACATCAACATCCGAATCCACGACCTAGACCACAAAATCGGAAA |
| | | AAACGGAATCCTAGAAGGAATCGGAGTAAAAACAGCACTATCATT |
| | | CCAAAAATACCAAATCGACGAACTAGGAAAAGAAATCCGACCATG |
| | | CCGACTAAAAAAACGACCACCAGTACGA |
| 202 | Exemplary open | ATGGCTGCTTTTAAGCCTAATTCTATTAATTATATTCTTGGTCTTGAT |
| | reading frame for | ATTGGTATTGCTTCTGTTGGTTGGGCTATGGTTGAGATTGATGAGGA |
| | Nme1Cas9 HNH | GGAGAATCCTATTCGTCTTATTGATCTTGGTGTTCGTGTTTTTGAGC |
| | nickase | GTGCTGAGGTTCCTAAGACTGGTGATTCTCTTGCTATGGCTCGTCGT |
| | | CTTGCTCGTTCTGTTCGTCGTCTTACTCGTCGTCGTGCTCATCGTCTT |
| | | CTTCGTACTCGTCGTCTTCTTAAGCGTGAGGGTGTTCTTCAGGCTGC |
| | | TAATTTTGATGAGAATGGTCTTATTAAGTCTCTTCCTAATACTCCTT |
| | | GGCAGCTTCGTGCTGCTGCTCTTGATCGTAAGCTTACTCCTCTTGAG |
| | | TGGTCTGCTGTTCTTCTTCATCTTATTAAGCATCGTGGTTATCTTTCT |
| | | CAGCGTAAGAATGAGGGTGAGACTGCTGATAAGGAGCTTGGTGCTC |
| | | TTCTTAAGGGTGTTGCTGGTAATGCTCATGCTCTTCAGACTGGTGAT |
| | | TTTCGTACTCCTGCTGAGCTTGCTCTTAATAAGTTTGAGAAGGAGTC |
| | | TGGTCATATTCGTAATCAGCGTTCTGATTATTCTCATACTTTTTCTCG |
| | | TAAGGATCTTCAGGCTGAGCTTATTCTTCTTTTTGAGAAGCAGAAGG |
| | | AGTTTGGTAATCCTCATGTTTCTGGTGGTCTTAAGGAGGGTATTGAG |
| | | ACTCTTCTTATGACTCAGCGTCCTGCTCTTTCTGGTGATGCTGTTCA |
| | | GAAGATGCTTGGTCATTGTACTTTTGAGCCTGCTGAGCCTAAGGCTG |
| | | CTAAGAATACTTATACTGCTGAGCGTTTTATTTGGCTTACTAAGCTT |
| | | AATAATCTTCGTATTCTTGAGCAGGGTTCTGAGCGTCCTCTTACTGA |
| | | TACTGAGCGTGCTACTCTTATGGATGAGCCTTATCGTAAGTCTAAGC |
| | | TTACTTATGCTCAGGCTCGTAAGCTTCTTGGTCTTGAGGATACTGCT |
| | | TTTTTTAAGGGTCTTCGTTATGGTAAGGATAATGCTGAGGCTTCTAC |
| | | TCTTATGGAGATGAAGGCTTATCATGCTATTTCTCGTGCTCTTGAGA |
| | | AGGAGGGTCTTAAGGATAAGAAGTCTCCTCTTAATCTTTCTCCTGAG |
| | | CTTCAGGATGAGATTGGTACTGCTTTTTCTCTTTTTAAGACTGATGA |
| | | GGATATTACTGGTCGTCTTAAGGATCGTATTCAGCCTGAGATTCTTG |
| | | AGGCTCTTCTTAAGCATATTTCTTTTGATAAGTTTGTTCAGATTTCTC |
| | | TTAAGGCTCTTCGTCGTATTGTTCCTCTTATGGAGCAGGGTAAGCGT |
| | | TATGATGAGGCTTGTGCTGAGATTTATGGTGATCATTATGGTAAGA |
| | | AGAATACTGAGGAGAAGATTTATCTTCCTCCTATTCCTGCTGATGAG |
| | | ATTCGTAATCCTGTTGTTCTTCGTGCTCTTTCTCAGGCTCGTAAGGTT |
| | | ATTAATGGTGTTGTTCGTCGTTATGGTTCTCCTGCTCGTATTCATATT |
| | | GAGACTGCTCGTGAGGTTGGTAAGTCTTTTAAGGATCGTAAGGAGA |
| | | TTGAGAAGCGTCAGGAGGAGAATCGTAAGGATCGTGAGAAGGCTG |
| | | CTGCTAAGTTTCGTGAGTATTTTCCTAATTTTGTTGGTGAGCCTAAG |
| | | TCTAAGGATATTCTTAAGCTTCGTCTTTATGAGCAGCAGCATGGTAA |
| | | GTGTCTTTATTCTGGTAAGGAGATTAATCTTGGTCGTCTTAATGAGA |
| | | AGGGTTATGTTGAGATTGATGCTGCTCTTCCTTTTTCTCGTACTTGG |
| | | GATGATTCTTTTAATAATAAGGTTCTTGTTCTTGGTTCTGAGAATCA |
| | | GAATAAGGGTAATCAGACTCCTTATGAGTATTTTAATGGTAAGGAT |
| | | AATTCTCGTGAGTGGCAGGAGTTTAAGGCTCGTGTTGAGACTTCTC |
| | | GTTTTCCTCGTTCTAAGAAGCAGCGTATTCTTCTTCAGAAGTTTGAT |
| | | GAGGATGGTTTTAAGGAGCGTAATCTTAATGATACTCGTTATGTTA |
| | | ATCGTTTTCTTTGTCAGTTTGTTGCTGATCGTATGCGTCTTACTGGTA |
| | | AGGGTAAGAAGCGTGTTTTTGCTTCTAATGGTCAGATTACTAATCTT |
| | | CTTCGTGGTTTTTGGGGTCTTCGTAAGGTTCGTGCTGAGAATGATCG |
| | | TCATCATGCTCTTGATGCTGTTGTTGTTGCTTGTTCTACTGTTGCTAT |
| | | GCAGCAGAAGATTACTCGTTTTGTTCGTTATAAGGAGATGAATGCT |
| | | TTTGATGGTAAGACTATTGATAAGGAGACTGGTGAGGTTCTTCATC |
| | | AGAAGACTCATTTTCCTCAGCCTTGGGAGTTTTTTGCTCAGGAGGTT |
| | | ATGATTCGTGTTTTTGGTAAGCCTGATGGTAAGCCTGAGTTTGAGGA |
| | | GGCTGATACTCTTGAGAAGCTTCGTACTCTTCTTGCTGAGAAGCTTT |
| | | CTTCTCGTCCTGAGGCTGTTCATGAGTATGTTACTCCTCTTTTTGTTT |
| | | CTCGTGCTCCTAATCGTAAGATGTCTGGTCAGGGTCATATGGAGAC |
| | | TGTTAAGTCTGCTAAGCGTCTTGATGAGGGTGTTTCTGTTCTTCGTG |
| | | TTCCTCTTACTCAGCTTAAGCTTAAGGATCTTGAGAAGATGGTTAAT |
| | | CGTGAGCGTGAGCCTAAGCTTTATGAGGCTCTTAAGGCTCGTCTTG |
| | | AGGCTCATAAGGATGATCCTGCTAAGGCTTTTGCTGAGCCTTTTTAT |
| | | AAGTATGATAAGGCTGGTAATCGTACTCAGCAGGTTAAGGCTGTTC |
| | | GTGTTGAGCAGGTTCAGAAGACTGGTGTTTGGGTTCGTAATCATAA |
| | | TGGTATTGCTGATAATGCTACTATGGTTCGTGTTGATGTTTTTGAGA |
| | | AGGGTGATAAGTATTATCTTGTTCCTATTTATTCTTGGCAGGTTGCT |
| | | AAGGGTATTCTTCCTGATCGTGCTGTTGTTCAGGGTAAGGATGAGG |
| | | AGGATTGGCAGCTTATTGATGATTCTTTTAATTTTAAGTTTTCTCTTC |
| | | ATCCTAATGATCTTGTTGAGGTTATTACTAAGAAGGCTCGTATGTTT |
| | | GGTTATTTTGCTTCTTGTCATCGTGGTACTGGTAATATTAATATTCGT |
| | | ATTCATGATCTTGATCATAAGATTGGTAAGAATGGTATTCTTGAGG |
| | | GTATTGGTGTTAAGACTGCTCTTTCTTTTCAGAAGTATCAGATTGAT |
| | | GAGCTTGGTAAGGAGATTCGTCCTTGTCGTCTTAAGAAGCGTCCTCC |
| | | TGTTCGTUGA |
| 203 | Exemplary open | ATGGCCGCCTTCAAGCCCAACTCCATCAACTACATCCTGGGCCTGG |
| | reading frame for | ACATCGGCATCGCCTCCGTGGGCTGGGCCATGGTGGAGATCGACGA |
| | Nme1Cas9 HNH | GGAGGAGAACCCCATCCGGCTGATCGACCTGGGCGTGCGGGTGTTC |
| | nickase | GAGCGGGCCGAGGTGCCCAAGACCGGCGACTCCCTGGCCATGGCCC |
| | | GGCGGCTGGCCCGGTCCGTGCGGCGGCTGACCCGGCGGCGGGCCCA |
| | | CCGGCTGCTGCGGACCCGGCGGCTGCTGAAGCGGGAGGGCGTGCTG |
| | | CAGGCCGCCAACTTCGACGAGAACGGCCTGATCAAGTCCCTGCCCA |
| | | ACACCCCCTGGCAGCTGCGGGCCGCCGCCCTGGACCGGAAGCTGAC |
| | | CCCCCTGGAGTGGTCCGCCGTGCTGCTGCACCTGATCAAGCACCGG |
| | | GGCTACCTGTCCCAGCGGAAGAACGAGGGCGAGACCGCCGACAAG |
| | | GAGCTGGGCGCCCTGCTGAAGGGCGTGGCCGGCAACGCCCACGCCC |
| | | TGCAGACCGGCGACTTCCGGACCCCCGCCGAGCTGGCCCTGAACAA |
| | | GTTCGAGAAGGAGTCCGGCCACATCCGGAACCAGCGGTCCGACTAC |
| | | TCCCACACCTTCTCCCGGAAGGACCTGCAGGCCGAGCTGATCCTGC |
| | | TGTTCGAGAAGCAGAAGGAGTTCGGCAACCCCCACGTGTCCGGCGG |
| | | CCTGAAGGAGGGCATCGAGACCCTGCTGATGACCCAGCGGCCCGCC |
| | | CTGTCCGGCGACGCCGTGCAGAAGATGCTGGGCCACTGCACCTTCG |
| | | AGCCCGCCGAGCCCAAGGCCGCCAAGAACACCTACACCGCCGAGC |
| | | GGTTCATCTGGCTGACCAAGCTGAACAACCTGCGGATCCTGGAGCA |
| | | GGGCTCCGAGCGGCCCCTGACCGACACCGAGCGGGCCACCCTGATG |
| | | GACGAGCCCTACCGGAAGTCCAAGCTGACCTACGCCCAGGCCCGGA |
| | | AGCTGCTGGGCCTGGAGGACACCGCCTTCTTCAAGGGCCTGCGGTA |
| | | CGGCAAGGACAACGCCGAGGCCTCCACCCTGATGGAGATGAAGGC |
| | | CTACCACGCCATCTCCCGGGCCCTGGAGAAGGAGGGCCTGAAGGAC |
| | | AAGAAGTCCCCCCTGAACCTGTCCCCCGAGCTGCAGGACGAGATCG |
| | | GCACCGCCTTCTCCCTGTTCAAGACCGACGAGGACATCACCGGCCG |
| | | GCTGAAGGACCGGATCCAGCCCGAGATCCTGGAGGCCCTGCTGAAG |
| | | CACATCTCCTTCGACAAGTTCGTGCAGATCTCCCTGAAGGCCCTGCG |
| | | GCGGATCGTGCCCCTGATGGAGCAGGGCAAGCGGTACGACGAGGC |
| | | CTGCGCCGAGATCTACGGCGACCACTACGGCAAGAAGAACACCGA |
| | | GGAGAAGATCTACCTGCCCCCCATCCCCGCCGACGAGATCCGGAAC |
| | | CCCGTGGTGCTGCGGGCCCTGTCCCAGGCCCGGAAGGTGATCAACG |
| | | GCGTGGTGCGGCGGTACGGCTCCCCCGCCCGGATCCACATCGAGAC |
| | | CGCCCGGGAGGTGGGCAAGTCCTTCAAGGACCGGAAGGAGATCGA |
| | | GAAGCGGCAGGAGGAGAACCGGAAGGACCGGGAGAAGGCCGCCG |
| | | CCAAGTTCCGGGAGTACTTCCCCAACTTCGTGGGCGAGCCCAAGTC |
| | | CAAGGACATCCTGAAGCTGCGGCTGTACGAGCAGCAGCACGGCAA |
| | | GTGCCTGTACTCCGGCAAGGAGATCAACCTGGGCCGGCTGAACGAG |
| | | AAGGGCTACGTGGAGATCGACGCCGCCCTGCCCTTCTCCCGGACCT |
| | | GGGACGACTCCTTCAACAACAAGGTGCTGGTGCTGGGCTCCGAGAA |
| | | CCAGAACAAGGGCAACCAGACCCCCTACGAGTACTTCAACGGCAA |
| | | GGACAACTCCCGGGAGTGGCAGGAGTTCAAGGCCCGGGTGGAGAC |
| | | CTCCCGGTTCCCCCGGTCCAAGAAGCAGCGGATCCTGCTGCAGAAG |
| | | TTCGACGAGGACGGCTTCAAGGAGCGGAACCTGAACGACACCCGG |
| | | TACGTGAACCGGTTCCTGTGCCAGTTCGTGGCCGACCGGATGCGGC |
| | | TGACCGGCAAGGGCAAGAAGCGGGTGTTCGCCTCCAACGGCCAGA |
| | | TCACCAACCTGCTGCGGGGCTTCTGGGGCCTGCGGAAGGTGCGGGC |
| | | CGAGAACGACCGGCACCACGCCCTGGACGCCGTGGTGGTGGCCTGC |
| | | TCCACCGTGGCCATGCAGCAGAAGATCACCCGGTTCGTGCGGTACA |
| | | AGGAGATGAACGCCTTCGACGGCAAGACCATCGACAAGGAGACCG |
| | | GCGAGGTGCTGCACCAGAAGACCCACTTCCCCCAGCCCTGGGAGTT |
| | | CTTCGCCCAGGAGGTGATGATCCGGGTGTTCGGCAAGCCCGACGGC |
| | | AAGCCCGAGTTCGAGGAGGCCGACACCCTGGAGAAGCTGCGGACC |
| | | CTGCTGGCCGAGAAGCTGTCCTCCCGGCCCGAGGCCGTGCACGAGT |
| | | ACGTGACCCCCCTGTTCGTGTCCCGGGCCCCCAACCGGAAGATGTC |
| | | CGGCCAGGGCCACATGGAGACCGTGAAGTCCGCCAAGCGGCTGGA |
| | | CGAGGGCGTGTCCGTGCTGCGGGTGCCCCTGACCCAGCTGAAGCTG |
| | | AAGGACCTGGAGAAGATGGTGAACCGGGAGCGGGAGCCCAAGCTG |
| | | TACGAGGCCCTGAAGGCCCGGCTGGAGGCCCACAAGGACGACCCC |
| | | GCCAAGGCCTTCGCCGAGCCCTTCTACAAGTACGACAAGGCCGGCA |
| | | ACCGGACCCAGCAGGTGAAGGCCGTGCGGGTGGAGCAGGTGCAGA |
| | | AGACCGGCGTGTGGGTGCGGAACCACAACGGCATCGCCGACAACG |
| | | CCACCATGGTGCGGGTGGACGTGTTCGAGAAGGGCGACAAGTACTA |
| | | CCTGGTGCCCATCTACTCCTGGCAGGTGGCCAAGGGCATCCTGCCC |
| | | GACCGGGCCGTGGTGCAGGGCAAGGACGAGGAGGACTGGCAGCTG |
| | | ATCGACGACTCCTTCAACTTCAAGTTCTCCCTGCACCCCAACGACCT |
| | | GGTGGAGGTGATCACCAAGAAGGCCCGGATGTTCGGCTACTTCGCC |
| | | TCCTGCCACCGGGGCACCGGCAACATCAACATCCGGATCCACGACC |
| | | TGGACCACAAGATCGGCAAGAACGGCATCCTGGAGGGCATCGGCG |
| | | TGAAGACCGCCCTGTCCTTCCAGAAGTACCAGATCGACGAGCTGGG |
| | | CAAGGAGATCCGGCCCTGCCGGCTGAAGAAGCGGCCCCCCGTGCG |
| | | GUGA |
| 204 | Exemplary open | ATGGCAGCATTCAAACCAAACTCAATCAACTACATCCTAGGACTAG |
| | reading frame for | ACATCGGAATCGCATCAGTAGGATGAGCAATGGTAGAAATCGACG |
| | Nme1Cas9 HNH | AAGAAGAAAACCCAATCCGACTAATCGACCTAGGAGTACGAGTATT |
| | nickase | CGAACGAGCAGAAGTACCAAAAACAGGAGACTCACTAGCAATGGC |
| | | ACGACGACTAGCACGATCAGTACGACGACTAACACGACGACGAGC |
| | | ACACCGACTACTACGAACACGACGACTACTAAAACGAGAAGGAGT |
| | | ACTACAAGCAGCAAACTTCGACGAAAACGGACTAATCAAATCACTA |
| | | CCAAACACACCATGACAACTACGAGCAGCAGCACTAGACCGAAAA |
| | | CTAACACCACTAGAATGATCAGCAGTACTACTACACCTAATCAAAC |
| | | ACCGAGGATACCTATCACAACGAAAAAACGAAGGAGAAACAGCAG |
| | | ACAAAGAACTAGGAGCACTACTAAAAGGAGTAGCAGGAAACGCAC |
| | | ACGCACTACAAACAGGAGACTTCCGAACACCAGCAGAACTAGCAC |
| | | TAAACAAATTCGAAAAAGAATCAGGACACATCCGAAACCAACGAT |
| | | CAGACTACTCACACACATTCTCACGAAAAGACCTACAAGCAGAACT |
| | | AATCCTACTATTCGAAAAACAAAAAGAATTCGGAAACCCACACGTA |
| | | TCAGGAGGACTAAAAGAAGGAATCGAAACACTACTAATGACACAA |
| | | CGACCAGCACTATCAGGAGACGCAGTACAAAAAATGCTAGGACAC |
| | | TGCACATTCGAACCAGCAGAACCAAAAGCAGCAAAAAACACATAC |
| | | ACAGCAGAACGATTCATCTGACTAACAAAACTAAACAACCTACGAA |
| | | TCCTAGAACAAGGATCAGAACGACCACTAACAGACACAGAACGAG |
| | | CAACACTAATGGACGAACCATACCGAAAATCAAAACTAACATACG |
| | | CACAAGCACGAAAACTACTAGGACTAGAAGACACAGCATTCTTCAA |
| | | AGGACTACGATACGGAAAAGACAACGCAGAAGCATCAACACTAAT |
| | | GGAAATGAAAGCATACCACGCAATCTCACGAGCACTAGAAAAAGA |
| | | AGGACTAAAAGACAAAAAATCACCACTAAACCTATCACCAGAACT |
| | | ACAAGACGAAATCGGAACAGCATTCTCACTATTCAAAACAGACGA |
| | | AGACATCACAGGACGACTAAAAGACCGAATCCAACCAGAAATCCT |
| | | AGAAGCACTACTAAAACACATCTCATTCGACAAATTCGTACAAATC |
| | | TCACTAAAAGCACTACGACGAATCGTACCACTAATGGAACAAGGA |
| | | AAACGATACGACGAAGCATGCGCAGAAATCTACGGAGACCACTAC |
| | | GGAAAAAAAAACACAGAAGAAAAAATCTACCTACCACCAATCCCA |
| | | GCAGACGAAATCCGAAACCCAGTAGTACTACGAGCACTATCACAA |
| | | GCACGAAAAGTAATCAACGGAGTAGTACGACGATACGGATCACCA |
| | | GCACGAATCCACATCGAAACAGCACGAGAAGTAGGAAAATCATTC |
| | | AAAGACCGAAAAGAAATCGAAAAACGACAAGAAGAAAACCGAAA |
| | | AGACCGAGAAAAAGCAGCAGCAAAATTCCGAGAATACTTCCCAAA |
| | | CTTCGTAGGAGAACCAAAATCAAAAGACATCCTAAAACTACGACTA |
| | | TACGAACAACAACACGGAAAATGCCTATACTCAGGAAAAGAAATC |
| | | AACCTAGGACGACTAAACGAAAAAGGATACGTAGAAATCGACGCA |
| | | GCACTACCATTCTCACGAACATGAGACGACTCATTCAACAACAAAG |
| | | TACTAGTACTAGGATCAGAAAACCAAAACAAAGGAAACCAAACAC |
| | | CATACGAATACTTCAACGGAAAAGACAACTCACGAGAATGACAAG |
| | | AATTCAAAGCACGAGTAGAAACATCACGATTCCCACGATCAAAAA |
| | | AACAACGAATCCTACTACAAAAATTCGACGAAGACGGATTCAAAG |
| | | AACGAAACCTAAACGACACACGATACGTAAACCGATTCCTATGCCA |
| | | ATTCGTAGCAGACCGAATGCGACTAACAGGAAAAGGAAAAAAACG |
| | | AGTATTCGCATCAAACGGACAAATCACAAACCTACTACGAGGATTC |
| | | TGAGGACTACGAAAAGTACGAGCAGAAAACGACCGACACCACGCA |
| | | CTAGACGCAGTAGTAGTAGCATGCTCAACAGTAGCAATGCAACAAA |
| | | AAATCACACGATTCGTACGATACAAAGAAATGAACGCATTCGACGG |
| | | AAAAACAATCGACAAAGAAACAGGAGAAGTACTACACCAAAAAAC |
| | | ACACTTCCCACAACCATGAGAATTCTTCGCACAAGAAGTAATGATC |
| | | CGAGTATTCGGAAAACCAGACGGAAAACCAGAATTCGAAGAAGCA |
| | | GACACACTAGAAAAACTACGAACACTACTAGCAGAAAAACTATCA |
| | | TCACGACCAGAAGCAGTACACGAATACGTAACACCACTATTCGTAT |
| | | CACGAGCACCAAACCGAAAAATGTCAGGACAAGGACACATGGAAA |
| | | CAGTAAAATCAGCAAAACGACTAGACGAAGGAGTATCAGTACTAC |
| | | GAGTACCACTAACACAACTAAAACTAAAAGACCTAGAAAAAATGG |
| | | TAAACCGAGAACGAGAACCAAAACTATACGAAGCACTAAAAGCAC |
| | | GACTAGAAGCACACAAAGACGACCCAGCAAAAGCATTCGCAGAAC |
| | | CATTCTACAAATACGACAAAGCAGGAAACCGAACACAACAAGTAA |
| | | AAGCAGTACGAGTAGAACAAGTACAAAAAACAGGAGTATGAGTAC |
| | | GAAACCACAACGGAATCGCAGACAACGCAACAATGGTACGAGTAG |
| | | ACGTATTCGAAAAAGGAGACAAATACTACCTAGTACCAATCTACTC |
| | | ATGACAAGTAGCAAAAGGAATCCTACCAGACCGAGCAGTAGTACA |
| | | AGGAAAAGACGAAGAAGACTGACAACTAATCGACGACTCATTCAA |
| | | CTTCAAATTCTCACTACACCCAAACGACCTAGTAGAAGTAATCACA |
| | | AAAAAAGCACGAATGTTCGGATACTTCGCATCATGCCACCGAGGAA |
| | | CAGGAAACATCAACATCCGAATCCACGACCTAGACCACAAAATCG |
| | | GAAAAAACGGAATCCTAGAAGGAATCGGAGTAAAAACAGCACTAT |
| | | CATTCCAAAAATACCAAATCGACGAACTAGGAAAAGAAATCCGAC |
| | | CATGCCGACTAAAAAAACGACCACCAGTACGAUAA |
| 205 | Exemplary amino | MAAFKPNPINYILGLDIGIASVGWAMVEIDEEENPIRLIDLGVRVFERAE |
| | acid sequence of | VPKTGDSLAMARRLARSVRRLTRRRAHRLLRARRLLKREGVLQAADF |
| | Nme2Cas9 | DENGLIKSLPNTPWQLRAAALDRKLTPLEWSAVLLHLIKHRGYLSQRK |
| | cleavase | NEGETADKELGALLKGVANNAHALQTGDFRTPAELALNKFEKESGHI |
| | | RNQRGDYSHTFSRKDLQAELILLFEKQKEFGNPHVSGGLKEGIETLLMT |
| | | QRPALSGDAVQKMLGHCTFEPAEPKAAKNTYTAERFIWLTKLNNLRIL |
| | | EQGSERPLTDTERATLMDEPYRKSKLTYAQARKLLGLEDTAFFKGLRY |
| | | GKDNAEASTLMEMKAYHAISRALEKEGLKDKKSPLNLSSELQDEIGTA |
| | | FSLFKTDEDITGRLKDRVQPEILEALLKHISFDKFVQISLKALRRIVPLME |
| | | QGKRYDEACAEIYGDHYGKKNTEEKIYLPPIPADEIRNPVVLRALSQAR |
| | | KVINGVVRRYGSPARIHIETAREVGKSFKDRKEIEKRQEENRKDREKA |
| | | AAKFREYFPNFVGEPKSKDILKLRLYEQQHGKCLYSGKEINLVRLNEK |
| | | GYVEIDHALPFSRTWDDSFNNKVLVLGSENQNKGNQTPYEYFNGKDN |
| | | SREWQEFKARVETSRFPRSKKQRILLQKFDEDGFKECNLNDTRYVNRF |
| | | LCQFVADHILLTGKGKRRVFASNGQITNLLRGFWGLRKVRAENDRHH |
| | | ALDAVVVACSTVAMQQKITRFVRYKEMNAFDGKTIDKETGKVLHQK |
| | | THFPQPWEFFAQEVMIRVFGKPDGKPEFEEADTPEKLRTLLAEKLSSRP |
| | | EAVHEYVTPLFVSRAPNRKMSGAHKDTLRSAKRFVKHNEKISVKRVW |
| | | LTEIKLADLENMVNYKNGREIELYEALKARLEAYGGNAKQAFDPKDN |
| | | PFYKKGGQLVKAVRVEKTQESGVLLNKKNAYTIADNGDMVRVDVFC |
| | | KVDKKGKNQYFIVPIYAWQVAENILPDIDCKGYRIDDSYTFCFSLHKY |
| | | DLIAFQKDEKSKVEFAYYINCDSSNGRFYLAWHDKGSKEQQFRISTQN |
| | | LVLIQKYQVNELGKEIRPCRLKKRPPVR |
| 206 | Exemplary | GCTGCTTTTAAGCCTAATCCTATTAATTATATTCTTGGTCTTGATATT |
| | coding sequence | GGTATTGCTTCTGTTGGTTGGGCTATGGTTGAGATTGATGAGGAGG |
| | encoding | AGAATCCTATTCGTCTTATTGATCTTGGTGTTCGTGTTTTTGAGCGT |
| | Nme2Cas9 | GCTGAGGTTCCTAAGACTGGTGATTCTCTTGCTATGGCTCGTCGTCT |
| | cleavase | TGCTCGTTCTGTTCGTCGTCTTACTCGTCGTCGTGCTCATCGTCTTCT |
| | | TCGTGCTCGTCGTCTTCTTAAGCGTGAGGGTGTTCTTCAGGCTGCTG |
| | | ATTTTGATGAGAATGGTCTTATTAAGTCTCTTCCTAATACTCCTTGG |
| | | CAGCTTCGTGCTGCTGCTCTTGATCGTAAGCTTACTCCTCTTGAGTG |
| | | GTCTGCTGTTCTTCTTCATCTTATTAAGCATCGTGGTTATCTTTCTCA |
| | | GCGTAAGAATGAGGGTGAGACTGCTGATAAGGAGCTTGGTGCTCTT |
| | | CTTAAGGGTGTTGCTAATAATGCTCATGCTCTTCAGACTGGTGATTT |
| | | TCGTACTCCTGCTGAGCTTGCTCTTAATAAGTTTGAGAAGGAGTCTG |
| | | GTCATATTCGTAATCAGCGTGGTGATTATTCTCATACTTTTTCTCGT |
| | | AAGGATCTTCAGGCTGAGCTTATTCTTCTTTTTGAGAAGCAGAAGG |
| | | AGTTTGGTAATCCTCATGTTTCTGGTGGTCTTAAGGAGGGTATTGAG |
| | | ACTCTTCTTATGACTCAGCGTCCTGCTCTTTCTGGTGATGCTGTTCA |
| | | GAAGATGCTTGGTCATTGTACTTTTGAGCCTGCTGAGCCTAAGGCTG |
| | | CTAAGAATACTTATACTGCTGAGCGTTTTATTTGGCTTACTAAGCTT |
| | | AATAATCTTCGTATTCTTGAGCAGGGTTCTGAGCGTCCTCTTACTGA |
| | | TACTGAGCGTGCTACTCTTATGGATGAGCCTTATCGTAAGTCTAAGC |
| | | TTACTTATGCTCAGGCTCGTAAGCTTCTTGGTCTTGAGGATACTGCT |
| | | TTTTTTAAGGGTCTTCGTTATGGTAAGGATAATGCTGAGGCTTCTAC |
| | | TCTTATGGAGATGAAGGCTTATCATGCTATTTCTCGTGCTCTTGAGA |
| | | AGGAGGGTCTTAAGGATAAGAAGTCTCCTCTTAATCTTTCTTCTGAG |
| | | CTTCAGGATGAGATTGGTACTGCTTTTTCTCTTTTTAAGACTGATGA |
| | | GGATATTACTGGTCGTCTTAAGGATCGTGTTCAGCCTGAGATTCTTG |
| | | AGGCTCTTCTTAAGCATATTTCTTTTGATAAGTTTGTTCAGATTTCTC |
| | | TTAAGGCTCTTCGTCGTATTGTTCCTCTTATGGAGCAGGGTAAGCGT |
| | | TATGATGAGGCTTGTGCTGAGATTTATGGTGATCATTATGGTAAGA |
| | | AGAATACTGAGGAGAAGATTTATCTTCCTCCTATTCCTGCTGATGAG |
| | | ATTCGTAATCCTGTTGTTCTTCGTGCTCTTTCTCAGGCTCGTAAGGTT |
| | | ATTAATGGTGTTGTTCGTCGTTATGGTTCTCCTGCTCGTATTCATATT |
| | | GAGACTGCTCGTGAGGTTGGTAAGTCTTTTAAGGATCGTAAGGAGA |
| | | TTGAGAAGCGTCAGGAGGAGAATCGTAAGGATCGTGAGAAGGCTG |
| | | CTGCTAAGTTTCGTGAGTATTTTCCTAATTTTGTTGGTGAGCCTAAG |
| | | TCTAAGGATATTCTTAAGCTTCGTCTTTATGAGCAGCAGCATGGTAA |
| | | GTGTCTTTATTCTGGTAAGGAGATTAATCTTGTTCGTCTTAATGAGA |
| | | AGGGTTATGTTGAGATTGATCATGCTCTTCCTTTTTCTCGTACTTGG |
| | | GATGATTCTTTTAATAATAAGGTTCTTGTTCTTGGTTCTGAGAATCA |
| | | GAATAAGGGTAATCAGACTCCTTATGAGTATTTTAATGGTAAGGAT |
| | | AATTCTCGTGAGTGGCAGGAGTTTAAGGCTCGTGTTGAGACTTCTC |
| | | GTTTTCCTCGTTCTAAGAAGCAGCGTATTCTTCTTCAGAAGTTTGAT |
| | | GAGGATGGTTTTAAGGAGTGTAATCTTAATGATACTCGTTATGTTAA |
| | | TCGTTTTCTTTGTCAGTTTGTTGCTGATCATATTCTTCTTACTGGTAA |
| | | GGGTAAGCGTCGTGTTTTTGCTTCTAATGGTCAGATTACTAATCTTC |
| | | TTCGTGGTTTTTGGGGTCTTCGTAAGGTTCGTGCTGAGAATGATCGT |
| | | CATCATGCTCTTGATGCTGTTGTTGTTGCTTGTTCTACTGTTGCTATG |
| | | CAGCAGAAGATTACTCGTTTTGTTCGTTATAAGGAGATGAATGCTTT |
| | | TGATGGTAAGACTATTGATAAGGAGACTGGTAAGGTTCTTCATCAG |
| | | AAGACTCATTTTCCTCAGCCTTGGGAGTTTTTTGCTCAGGAGGTTAT |
| | | GATTCGTGTTTTTGGTAAGCCTGATGGTAAGCCTGAGTTTGAGGAG |
| | | GCTGATACTCCTGAGAAGCTTCGTACTCTTCTTGCTGAGAAGCTTTC |
| | | TTCTCGTCCTGAGGCTGTTCATGAGTATGTTACTCCTCTTTTTGTTTC |
| | | TCGTGCTCCTAATCGTAAGATGTCTGGTGCTCATAAGGATACTCTTC |
| | | GTTCTGCTAAGCGTTTTGTTAAGCATAATGAGAAGATTTCTGTTAAG |
| | | CGTGTTTGGCTTACTGAGATTAAGCTTGCTGATCTTGAGAATATGGT |
| | | TAATTATAAGAATGGTCGTGAGATTGAGCTTTATGAGGCTCTTAAG |
| | | GCTCGTCTTGAGGCTTATGGTGGTAATGCTAAGCAGGCTTTTGATCC |
| | | TAAGGATAATCCTTTTTATAAGAAGGGTGGTCAGCTTGTTAAGGCT |
| | | GTTCGTGTTGAGAAGACTCAGGAGTCTGGTGTTCTTCTTAATAAGA |
| | | AGAATGCTTATACTATTGCTGATAATGGTGATATGGTTCGTGTTGAT |
| | | GTTTTTTGTAAGGTTGATAAGAAGGGTAAGAATCAGTATTTTATTGT |
| | | TCCTATTTATGCTTGGCAGGTTGCTGAGAATATTCTTCCTGATATTG |
| | | ATTGTAAGGGTTATCGTATTGATGATTCTTATACTTTTTGTTTTTCTC |
| | | TTCATAAGTATGATCTTATTGCTTTTCAGAAGGATGAGAAGTCTAAG |
| | | GTTGAGTTTGCTTATTATATTAATTGTGATTCTTCTAATGGTCGTTTT |
| | | TATCTTGCTTGGCATGATAAGGGTTCTAAGGAGCAGCAGTTTCGTAT |
| | | TTCTACTCAGAATCTTGTTCTTATTCAGAAGTATCAGGTTAATGAGC |
| | | TTGGTAAGGAGATTCGTCCTTGTCGTCTTAAGAAGCGTCCTCCTGTT |
| | | CGT |
| 207 | Exemplary | GCCGCCTTCAAGCCCAACCCCATCAACTACATCCTGGGCCTGGACA |
| | coding sequence | TCGGCATCGCCTCCGTGGGCTGGGCCATGGTGGAGATCGACGAGGA |
| | encoding | GGAGAACCCCATCCGGCTGATCGACCTGGGCGTGCGGGTGTTCGAG |
| | Nme2Cas9 | CGGGCCGAGGTGCCCAAGACCGGCGACTCCCTGGCCATGGCCCGGC |
| | cleavase | GGCTGGCCCGGTCCGTGCGGCGGCTGACCCGGCGGCGGGCCCACCG |
| | | GCTGCTGCGGGCCCGGCGGCTGCTGAAGCGGGAGGGCGTGCTGCA |
| | | GGCCGCCGACTTCGACGAGAACGGCCTGATCAAGTCCCTGCCCAAC |
| | | ACCCCCTGGCAGCTGCGGGCCGCCGCCCTGGACCGGAAGCTGACCC |
| | | CCCTGGAGTGGTCCGCCGTGCTGCTGCACCTGATCAAGCACCGGGG |
| | | CTACCTGTCCCAGCGGAAGAACGAGGGCGAGACCGCCGACAAGGA |
| | | GCTGGGCGCCCTGCTGAAGGGCGTGGCCAACAACGCCCACGCCCTG |
| | | CAGACCGGCGACTTCCGGACCCCCGCCGAGCTGGCCCTGAACAAGT |
| | | TCGAGAAGGAGTCCGGCCACATCCGGAACCAGCGGGGCGACTACT |
| | | CCCACACCTTCTCCCGGAAGGACCTGCAGGCCGAGCTGATCCTGCT |
| | | GTTCGAGAAGCAGAAGGAGTTCGGCAACCCCCACGTGTCCGGCGGC |
| | | CTGAAGGAGGGCATCGAGACCCTGCTGATGACCCAGCGGCCCGCCC |
| | | TGTCCGGCGACGCCGTGCAGAAGATGCTGGGCCACTGCACCTTCGA |
| | | GCCCGCCGAGCCCAAGGCCGCCAAGAACACCTACACCGCCGAGCG |
| | | GTTCATCTGGCTGACCAAGCTGAACAACCTGCGGATCCTGGAGCAG |
| | | GGCTCCGAGCGGCCCCTGACCGACACCGAGCGGGCCACCCTGATGG |
| | | ACGAGCCCTACCGGAAGTCCAAGCTGACCTACGCCCAGGCCCGGAA |
| | | GCTGCTGGGCCTGGAGGACACCGCCTTCTTCAAGGGCCTGCGGTAC |
| | | GGCAAGGACAACGCCGAGGCCTCCACCCTGATGGAGATGAAGGCC |
| | | TACCACGCCATCTCCCGGGCCCTGGAGAAGGAGGGCCTGAAGGAC |
| | | AAGAAGTCCCCCCTGAACCTGTCCTCCGAGCTGCAGGACGAGATCG |
| | | GCACCGCCTTCTCCCTGTTCAAGACCGACGAGGACATCACCGGCCG |
| | | GCTGAAGGACCGGGTGCAGCCCGAGATCCTGGAGGCCCTGCTGAA |
| | | GCACATCTCCTTCGACAAGTTCGTGCAGATCTCCCTGAAGGCCCTGC |
| | | GGCGGATCGTGCCCCTGATGGAGCAGGGCAAGCGGTACGACGAGG |
| | | CCTGCGCCGAGATCTACGGCGACCACTACGGCAAGAAGAACACCG |
| | | AGGAGAAGATCTACCTGCCCCCCATCCCCGCCGACGAGATCCGGAA |
| | | CCCCGTGGTGCTGCGGGCCCTGTCCCAGGCCCGGAAGGTGATCAAC |
| | | GGCGTGGTGCGGCGGTACGGCTCCCCCGCCCGGATCCACATCGAGA |
| | | CCGCCCGGGAGGTGGGCAAGTCCTTCAAGGACCGGAAGGAGATCG |
| | | AGAAGCGGCAGGAGGAGAACCGGAAGGACCGGGAGAAGGCCGCC |
| | | GCCAAGTTCCGGGAGTACTTCCCCAACTTCGTGGGCGAGCCCAAGT |
| | | CCAAGGACATCCTGAAGCTGCGGCTGTACGAGCAGCAGCACGGCA |
| | | AGTGCCTGTACTCCGGCAAGGAGATCAACCTGGTGCGGCTGAACGA |
| | | GAAGGGCTACGTGGAGATCGACCACGCCCTGCCCTTCTCCCGGACC |
| | | TGGGACGACTCCTTCAACAACAAGGTGCTGGTGCTGGGCTCCGAGA |
| | | ACCAGAACAAGGGCAACCAGACCCCCTACGAGTACTTCAACGGCA |
| | | AGGACAACTCCCGGGAGTGGCAGGAGTTCAAGGCCCGGGTGGAGA |
| | | CCTCCCGGTTCCCCCGGTCCAAGAAGCAGCGGATCCTGCTGCAGAA |
| | | GTTCGACGAGGACGGCTTCAAGGAGTGCAACCTGAACGACACCCG |
| | | GTACGTGAACCGGTTCCTGTGCCAGTTCGTGGCCGACCACATCCTG |
| | | CTGACCGGCAAGGGCAAGCGGCGGGTGTTCGCCTCCAACGGCCAG |
| | | ATCACCAACCTGCTGCGGGGCTTCTGGGGCCTGCGGAAGGTGCGGG |
| | | CCGAGAACGACCGGCACCACGCCCTGGACGCCGTGGTGGTGGCCTG |
| | | CTCCACCGTGGCCATGCAGCAGAAGATCACCCGGTTCGTGCGGTAC |
| | | AAGGAGATGAACGCCTTCGACGGCAAGACCATCGACAAGGAGACC |
| | | GGCAAGGTGCTGCACCAGAAGACCCACTTCCCCCAGCCCTGGGAGT |
| | | TCTTCGCCCAGGAGGTGATGATCCGGGTGTTCGGCAAGCCCGACGG |
| | | CAAGCCCGAGTTCGAGGAGGCCGACACCCCCGAGAAGCTGCGGAC |
| | | CCTGCTGGCCGAGAAGCTGTCCTCCCGGCCCGAGGCCGTGCACGAG |
| | | TACGTGACCCCCCTGTTCGTGTCCCGGGCCCCCAACCGGAAGATGT |
| | | CCGGCGCCCACAAGGACACCCTGCGGTCCGCCAAGCGGTTCGTGAA |
| | | GCACAACGAGAAGATCTCCGTGAAGCGGGTGTGGCTGACCGAGAT |
| | | CAAGCTGGCCGACCTGGAGAACATGGTGAACTACAAGAACGGCCG |
| | | GGAGATCGAGCTGTACGAGGCCCTGAAGGCCCGGCTGGAGGCCTA |
| | | CGGCGGCAACGCCAAGCAGGCCTTCGACCCCAAGGACAACCCCTTC |
| | | TACAAGAAGGGCGGCCAGCTGGTGAAGGCCGTGCGGGTGGAGAAG |
| | | ACCCAGGAGTCCGGCGTGCTGCTGAACAAGAAGAACGCCTACACC |
| | | ATCGCCGACAACGGCGACATGGTGCGGGTGGACGTGTTCTGCAAGG |
| | | TGGACAAGAAGGGCAAGAACCAGTACTTCATCGTGCCCATCTACGC |
| | | CTGGCAGGTGGCCGAGAACATCCTGCCCGACATCGACTGCAAGGGC |
| | | TACCGGATCGACGACTCCTACACCTTCTGCTTCTCCCTGCACAAGTA |
| | | CGACCTGATCGCCTTCCAGAAGGACGAGAAGTCCAAGGTGGAGTTC |
| | | GCCTACTACATCAACTGCGACTCCTCCAACGGCCGGTTCTACCTGGC |
| | | CTGGCACGACAAGGGCTCCAAGGAGCAGCAGTTCCGGATCTCCACC |
| | | CAGAACCTGGTGCTGATCCAGAAGTACCAGGTGAACGAGCTGGGC |
| | | AAGGAGATCCGGCCCTGCCGGCTGAAGAAGCGGCCCCCCGTGCGG |
| 208 | Exemplary | GCAGCATTCAAACCAAACCCAATCAACTACATCCTAGGACTAGACA |
| | coding sequence | TCGGAATCGCATCAGTAGGATGAGCAATGGTAGAAATCGACGAAG |
| | encoding | AAGAAAACCCAATCCGACTAATCGACCTAGGAGTACGAGTATTCGA |
| | Nme2Cas9 | ACGAGCAGAAGTACCAAAAACAGGAGACTCACTAGCAATGGCACG |
| | cleavase | ACGACTAGCACGATCAGTACGACGACTAACACGACGACGAGCACA |
| | | CCGACTACTACGAGCACGACGACTACTAAAACGAGAAGGAGTACT |
| | | ACAAGCAGCAGACTTCGACGAAAACGGACTAATCAAATCACTACC |
| | | AAACACACCATGACAACTACGAGCAGCAGCACTAGACCGAAAACT |
| | | AACACCACTAGAATGATCAGCAGTACTACTACACCTAATCAAACAC |
| | | CGAGGATACCTATCACAACGAAAAAACGAAGGAGAAACAGCAGAC |
| | | AAAGAACTAGGAGCACTACTAAAAGGAGTAGCAAACAACGCACAC |
| | | GCACTACAAACAGGAGACTTCCGAACACCAGCAGAACTAGCACTA |
| | | AACAAATTCGAAAAAGAATCAGGACACATCCGAAACCAACGAGGA |
| | | GACTACTCACACACATTCTCACGAAAAGACCTACAAGCAGAACTAA |
| | | TCCTACTATTCGAAAAACAAAAAGAATTCGGAAACCCACACGTATC |
| | | AGGAGGACTAAAAGAAGGAATCGAAACACTACTAATGACACAACG |
| | | ACCAGCACTATCAGGAGACGCAGTACAAAAAATGCTAGGACACTG |
| | | CACATTCGAACCAGCAGAACCAAAAGCAGCAAAAAACACATACAC |
| | | AGCAGAACGATTCATCTGACTAACAAAACTAAACAACCTACGAATC |
| | | CTAGAACAAGGATCAGAACGACCACTAACAGACACAGAACGAGCA |
| | | ACACTAATGGACGAACCATACCGAAAATCAAAACTAACATACGCA |
| | | CAAGCACGAAAACTACTAGGACTAGAAGACACAGCATTCTTCAAA |
| | | GGACTACGATACGGAAAAGACAACGCAGAAGCATCAACACTAATG |
| | | GAAATGAAAGCATACCACGCAATCTCACGAGCACTAGAAAAAGAA |
| | | GGACTAAAAGACAAAAAATCACCACTAAACCTATCATCAGAACTAC |
| | | AAGACGAAATCGGAACAGCATTCTCACTATTCAAAACAGACGAAG |
| | | ACATCACAGGACGACTAAAAGACCGAGTACAACCAGAAATCCTAG |
| | | AAGCACTACTAAAACACATCTCATTCGACAAATTCGTACAAATCTC |
| | | ACTAAAAGCACTACGACGAATCGTACCACTAATGGAACAAGGAAA |
| | | ACGATACGACGAAGCATGCGCAGAAATCTACGGAGACCACTACGG |
| | | AAAAAAAAACACAGAAGAAAAAATCTACCTACCACCAATCCCAGC |
| | | AGACGAAATCCGAAACCCAGTAGTACTACGAGCACTATCACAAGC |
| | | ACGAAAAGTAATCAACGGAGTAGTACGACGATACGGATCACCAGC |
| | | ACGAATCCACATCGAAACAGCACGAGAAGTAGGAAAATCATTCAA |
| | | AGACCGAAAAGAAATCGAAAAACGACAAGAAGAAAACCGAAAAG |
| | | ACCGAGAAAAAGCAGCAGCAAAATTCCGAGAATACTTCCCAAACTT |
| | | CGTAGGAGAACCAAAATCAAAAGACATCCTAAAACTACGACTATA |
| | | CGAACAACAACACGGAAAATGCCTATACTCAGGAAAAGAAATCAA |
| | | CCTAGTACGACTAAACGAAAAAGGATACGTAGAAATCGACCACGC |
| | | ACTACCATTCTCACGAACATGAGACGACTCATTCAACAACAAAGTA |
| | | CTAGTACTAGGATCAGAAAACCAAAACAAAGGAAACCAAACACCA |
| | | TACGAATACTTCAACGGAAAAGACAACTCACGAGAATGACAAGAA |
| | | TTCAAAGCACGAGTAGAAACATCACGATTCCCACGATCAAAAAAAC |
| | | AACGAATCCTACTACAAAAATTCGACGAAGACGGATTCAAAGAAT |
| | | GCAACCTAAACGACACACGATACGTAAACCGATTCCTATGCCAATT |
| | | CGTAGCAGACCACATCCTACTAACAGGAAAAGGAAAACGACGAGT |
| | | ATTCGCATCAAACGGACAAATCACAAACCTACTACGAGGATTCTGA |
| | | GGACTACGAAAAGTACGAGCAGAAAACGACCGACACCACGCACTA |
| | | GACGCAGTAGTAGTAGCATGCTCAACAGTAGCAATGCAACAAAAA |
| | | ATCACACGATTCGTACGATACAAAGAAATGAACGCATTCGACGGAA |
| | | AAACAATCGACAAAGAAACAGGAAAAGTACTACACCAAAAAACAC |
| | | ACTTCCCACAACCATGAGAATTCTTCGCACAAGAAGTAATGATCCG |
| | | AGTATTCGGAAAACCAGACGGAAAACCAGAATTCGAAGAAGCAGA |
| | | CACACCAGAAAAACTACGAACACTACTAGCAGAAAAACTATCATC |
| | | ACGACCAGAAGCAGTACACGAATACGTAACACCACTATTCGTATCA |
| | | CGAGCACCAAACCGAAAAATGTCAGGAGCACACAAAGACACACTA |
| | | CGATCAGCAAAACGATTCGTAAAACACAACGAAAAAATCTCAGTA |
| | | AAACGAGTATGACTAACAGAAATCAAACTAGCAGACCTAGAAAAC |
| | | ATGGTAAACTACAAAAACGGACGAGAAATCGAACTATACGAAGCA |
| | | CTAAAAGCACGACTAGAAGCATACGGAGGAAACGCAAAACAAGCA |
| | | TTCGACCCAAAAGACAACCCATTCTACAAAAAAGGAGGACAACTA |
| | | GTAAAAGCAGTACGAGTAGAAAAAACACAAGAATCAGGAGTACTA |
| | | CTAAACAAAAAAAACGCATACACAATCGCAGACAACGGAGACATG |
| | | GTACGAGTAGACGTATTCTGCAAAGTAGACAAAAAAGGAAAAAAC |
| | | CAATACTTCATCGTACCAATCTACGCATGACAAGTAGCAGAAAACA |
| | | TCCTACCAGACATCGACTGCAAAGGATACCGAATCGACGACTCATA |
| | | CACATTCTGCTTCTCACTACACAAATACGACCTAATCGCATTCCAAA |
| | | AAGACGAAAAATCAAAAGTAGAATTCGCATACTACATCAACTGCG |
| | | ACTCATCAAACGGACGATTCTACCTAGCATGACACGACAAAGGATC |
| | | AAAAGAACAACAATTCCGAATCTCAACACAAAACCTAGTACTAATC |
| | | CAAAAATACCAAGTAAACGAACTAGGAAAAGAAATCCGACCATGC |
| | | CGACTAAAAAAACGACCACCAGTACGA |
| 209 | Exemplary open | ATGGCTGCTTTTAAGCCTAATCCTATTAATTATATTCTTGGTCTTGAT |
| | reading frame for | ATTGGTATTGCTTCTGTTGGTTGGGCTATGGTTGAGATTGATGAGGA |
| | Nme2Cas9 | GGAGAATCCTATTCGTCTTATTGATCTTGGTGTTCGTGTTTTTGAGC |
| | cleavase | GTGCTGAGGTTCCTAAGACTGGTGATTCTCTTGCTATGGCTCGTCGT |
| | | CTTGCTCGTTCTGTTCGTCGTCTTACTCGTCGTCGTGCTCATCGTCTT |
| | | CTTCGTGCTCGTCGTCTTCTTAAGCGTGAGGGTGTTCTTCAGGCTGC |
| | | TGATTTTGATGAGAATGGTCTTATTAAGTCTCTTCCTAATACTCCTT |
| | | GGCAGCTTCGTGCTGCTGCTCTTGATCGTAAGCTTACTCCTCTTGAG |
| | | TGGTCTGCTGTTCTTCTTCATCTTATTAAGCATCGTGGTTATCTTTCT |
| | | CAGCGTAAGAATGAGGGTGAGACTGCTGATAAGGAGCTTGGTGCTC |
| | | TTCTTAAGGGTGTTGCTAATAATGCTCATGCTCTTCAGACTGGTGAT |
| | | TTTCGTACTCCTGCTGAGCTTGCTCTTAATAAGTTTGAGAAGGAGTC |
| | | TGGTCATATTCGTAATCAGCGTGGTGATTATTCTCATACTTTTTCTC |
| | | GTAAGGATCTTCAGGCTGAGCTTATTCTTCTTTTTGAGAAGCAGAAG |
| | | GAGTTTGGTAATCCTCATGTTTCTGGTGGTCTTAAGGAGGGTATTGA |
| | | GACTCTTCTTATGACTCAGCGTCCTGCTCTTTCTGGTGATGCTGTTC |
| | | AGAAGATGCTTGGTCATTGTACTTTTGAGCCTGCTGAGCCTAAGGCT |
| | | GCTAAGAATACTTATACTGCTGAGCGTTTTATTTGGCTTACTAAGCT |
| | | TAATAATCTTCGTATTCTTGAGCAGGGTTCTGAGCGTCCTCTTACTG |
| | | ATACTGAGCGTGCTACTCTTATGGATGAGCCTTATCGTAAGTCTAAG |
| | | CTTACTTATGCTCAGGCTCGTAAGCTTCTTGGTCTTGAGGATACTGC |
| | | TTTTTTTAAGGGTCTTCGTTATGGTAAGGATAATGCTGAGGCTTCTA |
| | | CTCTTATGGAGATGAAGGCTTATCATGCTATTTCTCGTGCTCTTGAG |
| | | AAGGAGGGTCTTAAGGATAAGAAGTCTCCTCTTAATCTTTCTTCTGA |
| | | GCTTCAGGATGAGATTGGTACTGCTTTTTCTCTTTTTAAGACTGATG |
| | | AGGATATTACTGGTCGTCTTAAGGATCGTGTTCAGCCTGAGATTCTT |
| | | GAGGCTCTTCTTAAGCATATTTCTTTTGATAAGTTTGTTCAGATTTCT |
| | | CTTAAGGCTCTTCGTCGTATTGTTCCTCTTATGGAGCAGGGTAAGCG |
| | | TTATGATGAGGCTTGTGCTGAGATTTATGGTGATCATTATGGTAAGA |
| | | AGAATACTGAGGAGAAGATTTATCTTCCTCCTATTCCTGCTGATGAG |
| | | ATTCGTAATCCTGTTGTTCTTCGTGCTCTTTCTCAGGCTCGTAAGGTT |
| | | ATTAATGGTGTTGTTCGTCGTTATGGTTCTCCTGCTCGTATTCATATT |
| | | GAGACTGCTCGTGAGGTTGGTAAGTCTTTTAAGGATCGTAAGGAGA |
| | | TTGAGAAGCGTCAGGAGGAGAATCGTAAGGATCGTGAGAAGGCTG |
| | | CTGCTAAGTTTCGTGAGTATTTTCCTAATTTTGTTGGTGAGCCTAAG |
| | | TCTAAGGATATTCTTAAGCTTCGTCTTTATGAGCAGCAGCATGGTAA |
| | | GTGTCTTTATTCTGGTAAGGAGATTAATCTTGTTCGTCTTAATGAGA |
| | | AGGGTTATGTTGAGATTGATCATGCTCTTCCTTTTTCTCGTACTTGG |
| | | GATGATTCTTTTAATAATAAGGTTCTTGTTCTTGGTTCTGAGAATCA |
| | | GAATAAGGGTAATCAGACTCCTTATGAGTATTTTAATGGTAAGGAT |
| | | AATTCTCGTGAGTGGCAGGAGTTTAAGGCTCGTGTTGAGACTTCTC |
| | | GTTTTCCTCGTTCTAAGAAGCAGCGTATTCTTCTTCAGAAGTTTGAT |
| | | GAGGATGGTTTTAAGGAGTGTAATCTTAATGATACTCGTTATGTTAA |
| | | TCGTTTTCTTTGTCAGTTTGTTGCTGATCATATTCTTCTTACTGGTAA |
| | | GGGTAAGCGTCGTGTTTTTGCTTCTAATGGTCAGATTACTAATCTTC |
| | | TTCGTGGTTTTTGGGGTCTTCGTAAGGTTCGTGCTGAGAATGATCGT |
| | | CATCATGCTCTTGATGCTGTTGTTGTTGCTTGTTCTACTGTTGCTATG |
| | | CAGCAGAAGATTACTCGTTTTGTTCGTTATAAGGAGATGAATGCTTT |
| | | TGATGGTAAGACTATTGATAAGGAGACTGGTAAGGTTCTTCATCAG |
| | | AAGACTCATTTTCCTCAGCCTTGGGAGTTTTTTGCTCAGGAGGTTAT |
| | | GATTCGTGTTTTTGGTAAGCCTGATGGTAAGCCTGAGTTTGAGGAG |
| | | GCTGATACTCCTGAGAAGCTTCGTACTCTTCTTGCTGAGAAGCTTTC |
| | | TTCTCGTCCTGAGGCTGTTCATGAGTATGTTACTCCTCTTTTTGTTTC |
| | | TCGTGCTCCTAATCGTAAGATGTCTGGTGCTCATAAGGATACTCTTC |
| | | GTTCTGCTAAGCGTTTTGTTAAGCATAATGAGAAGATTTCTGTTAAG |
| | | CGTGTTTGGCTTACTGAGATTAAGCTTGCTGATCTTGAGAATATGGT |
| | | TAATTATAAGAATGGTCGTGAGATTGAGCTTTATGAGGCTCTTAAG |
| | | GCTCGTCTTGAGGCTTATGGTGGTAATGCTAAGCAGGCTTTTGATCC |
| | | TAAGGATAATCCTTTTTATAAGAAGGGTGGTCAGCTTGTTAAGGCT |
| | | GTTCGTGTTGAGAAGACTCAGGAGTCTGGTGTTCTTCTTAATAAGA |
| | | AGAATGCTTATACTATTGCTGATAATGGTGATATGGTTCGTGTTGAT |
| | | GTTTTTTGTAAGGTTGATAAGAAGGGTAAGAATCAGTATTTTATTGT |
| | | TCCTATTTATGCTTGGCAGGTTGCTGAGAATATTCTTCCTGATATTG |
| | | ATTGTAAGGGTTATCGTATTGATGATTCTTATACTTTTTGTTTTTCTC |
| | | TTCATAAGTATGATCTTATTGCTTTTCAGAAGGATGAGAAGTCTAAG |
| | | GTTGAGTTTGCTTATTATATTAATTGTGATTCTTCTAATGGTCGTTTT |
| | | TATCTTGCTTGGCATGATAAGGGTTCTAAGGAGCAGCAGTTTCGTAT |
| | | TTCTACTCAGAATCTTGTTCTTATTCAGAAGTATCAGGTTAATGAGC |
| | | TTGGTAAGGAGATTCGTCCTTGTCGTCTTAAGAAGCGTCCTCCTGTT |
| | | CGTUGA |
| 210 | Exemplary open | ATGGCCGCCTTCAAGCCCAACCCCATCAACTACATCCTGGGCCTGG |
| | reading frame for | ACATCGGCATCGCCTCCGTGGGCTGGGCCATGGTGGAGATCGACGA |
| | Nme2Cas9 | GGAGGAGAACCCCATCCGGCTGATCGACCTGGGCGTGCGGGTGTTC |
| | cleavase | GAGCGGGCCGAGGTGCCCAAGACCGGCGACTCCCTGGCCATGGCCC |
| | | GGCGGCTGGCCCGGTCCGTGCGGCGGCTGACCCGGCGGCGGGCCCA |
| | | CCGGCTGCTGCGGGCCCGGCGGCTGCTGAAGCGGGAGGGCGTGCTG |
| | | CAGGCCGCCGACTTCGACGAGAACGGCCTGATCAAGTCCCTGCCCA |
| | | ACACCCCCTGGCAGCTGCGGGCCGCCGCCCTGGACCGGAAGCTGAC |
| | | CCCCCTGGAGTGGTCCGCCGTGCTGCTGCACCTGATCAAGCACCGG |
| | | GGCTACCTGTCCCAGCGGAAGAACGAGGGCGAGACCGCCGACAAG |
| | | GAGCTGGGCGCCCTGCTGAAGGGCGTGGCCAACAACGCCCACGCCC |
| | | TGCAGACCGGCGACTTCCGGACCCCCGCCGAGCTGGCCCTGAACAA |
| | | GTTCGAGAAGGAGTCCGGCCACATCCGGAACCAGCGGGGCGACTA |
| | | CTCCCACACCTTCTCCCGGAAGGACCTGCAGGCCGAGCTGATCCTG |
| | | CTGTTCGAGAAGCAGAAGGAGTTCGGCAACCCCCACGTGTCCGGCG |
| | | GCCTGAAGGAGGGCATCGAGACCCTGCTGATGACCCAGCGGCCCGC |
| | | CCTGTCCGGCGACGCCGTGCAGAAGATGCTGGGCCACTGCACCTTC |
| | | GAGCCCGCCGAGCCCAAGGCCGCCAAGAACACCTACACCGCCGAG |
| | | CGGTTCATCTGGCTGACCAAGCTGAACAACCTGCGGATCCTGGAGC |
| | | AGGGCTCCGAGCGGCCCCTGACCGACACCGAGCGGGCCACCCTGAT |
| | | GGACGAGCCCTACCGGAAGTCCAAGCTGACCTACGCCCAGGCCCGG |
| | | AAGCTGCTGGGCCTGGAGGACACCGCCTTCTTCAAGGGCCTGCGGT |
| | | ACGGCAAGGACAACGCCGAGGCCTCCACCCTGATGGAGATGAAGG |
| | | CCTACCACGCCATCTCCCGGGCCCTGGAGAAGGAGGGCCTGAAGGA |
| | | CAAGAAGTCCCCCCTGAACCTGTCCTCCGAGCTGCAGGACGAGATC |
| | | GGCACCGCCTTCTCCCTGTTCAAGACCGACGAGGACATCACCGGCC |
| | | GGCTGAAGGACCGGGTGCAGCCCGAGATCCTGGAGGCCCTGCTGA |
| | | AGCACATCTCCTTCGACAAGTTCGTGCAGATCTCCCTGAAGGCCCT |
| | | GCGGCGGATCGTGCCCCTGATGGAGCAGGGCAAGCGGTACGACGA |
| | | GGCCTGCGCCGAGATCTACGGCGACCACTACGGCAAGAAGAACAC |
| | | CGAGGAGAAGATCTACCTGCCCCCCATCCCCGCCGACGAGATCCGG |
| | | AACCCCGTGGTGCTGCGGGCCCTGTCCCAGGCCCGGAAGGTGATCA |
| | | ACGGCGTGGTGCGGCGGTACGGCTCCCCCGCCCGGATCCACATCGA |
| | | GACCGCCCGGGAGGTGGGCAAGTCCTTCAAGGACCGGAAGGAGAT |
| | | CGAGAAGCGGCAGGAGGAGAACCGGAAGGACCGGGAGAAGGCCG |
| | | CCGCCAAGTTCCGGGAGTACTTCCCCAACTTCGTGGGCGAGCCCAA |
| | | GTCCAAGGACATCCTGAAGCTGCGGCTGTACGAGCAGCAGCACGGC |
| | | AAGTGCCTGTACTCCGGCAAGGAGATCAACCTGGTGCGGCTGAACG |
| | | AGAAGGGCTACGTGGAGATCGACCACGCCCTGCCCTTCTCCCGGAC |
| | | CTGGGACGACTCCTTCAACAACAAGGTGCTGGTGCTGGGCTCCGAG |
| | | AACCAGAACAAGGGCAACCAGACCCCCTACGAGTACTTCAACGGC |
| | | AAGGACAACTCCCGGGAGTGGCAGGAGTTCAAGGCCCGGGTGGAG |
| | | ACCTCCCGGTTCCCCCGGTCCAAGAAGCAGCGGATCCTGCTGCAGA |
| | | AGTTCGACGAGGACGGCTTCAAGGAGTGCAACCTGAACGACACCC |
| | | GGTACGTGAACCGGTTCCTGTGCCAGTTCGTGGCCGACCACATCCT |
| | | GCTGACCGGCAAGGGCAAGCGGCGGGTGTTCGCCTCCAACGGCCA |
| | | GATCACCAACCTGCTGCGGGGCTTCTGGGGCCTGCGGAAGGTGCGG |
| | | GCCGAGAACGACCGGCACCACGCCCTGGACGCCGTGGTGGTGGCCT |
| | | GCTCCACCGTGGCCATGCAGCAGAAGATCACCCGGTTCGTGCGGTA |
| | | CAAGGAGATGAACGCCTTCGACGGCAAGACCATCGACAAGGAGAC |
| | | CGGCAAGGTGCTGCACCAGAAGACCCACTTCCCCCAGCCCTGGGAG |
| | | TTCTTCGCCCAGGAGGTGATGATCCGGGTGTTCGGCAAGCCCGACG |
| | | GCAAGCCCGAGTTCGAGGAGGCCGACACCCCCGAGAAGCTGCGGA |
| | | CCCTGCTGGCCGAGAAGCTGTCCTCCCGGCCCGAGGCCGTGCACGA |
| | | GTACGTGACCCCCCTGTTCGTGTCCCGGGCCCCCAACCGGAAGATG |
| | | TCCGGCGCCCACAAGGACACCCTGCGGTCCGCCAAGCGGTTCGTGA |
| | | AGCACAACGAGAAGATCTCCGTGAAGCGGGTGTGGCTGACCGAGA |
| | | TCAAGCTGGCCGACCTGGAGAACATGGTGAACTACAAGAACGGCC |
| | | GGGAGATCGAGCTGTACGAGGCCCTGAAGGCCCGGCTGGAGGCCT |
| | | ACGGCGGCAACGCCAAGCAGGCCTTCGACCCCAAGGACAACCCCTT |
| | | CTACAAGAAGGGCGGCCAGCTGGTGAAGGCCGTGCGGGTGGAGAA |
| | | GACCCAGGAGTCCGGCGTGCTGCTGAACAAGAAGAACGCCTACAC |
| | | CATCGCCGACAACGGCGACATGGTGCGGGTGGACGTGTTCTGCAAG |
| | | GTGGACAAGAAGGGCAAGAACCAGTACTTCATCGTGCCCATCTACG |
| | | CCTGGCAGGTGGCCGAGAACATCCTGCCCGACATCGACTGCAAGGG |
| | | CTACCGGATCGACGACTCCTACACCTTCTGCTTCTCCCTGCACAAGT |
| | | ACGACCTGATCGCCTTCCAGAAGGACGAGAAGTCCAAGGTGGAGTT |
| | | CGCCTACTACATCAACTGCGACTCCTCCAACGGCCGGTTCTACCTGG |
| | | CCTGGCACGACAAGGGCTCCAAGGAGCAGCAGTTCCGGATCTCCAC |
| | | CCAGAACCTGGTGCTGATCCAGAAGTACCAGGTGAACGAGCTGGGC |
| | | AAGGAGATCCGGCCCTGCCGGCTGAAGAAGCGGCCCCCCGTGCGG |
| | | UGA |
| 211 | Exemplary open | ATGGCAGCATTCAAACCAAACCCAATCAACTACATCCTAGGACTAG |
| | reading frame for | ACATCGGAATCGCATCAGTAGGATGAGCAATGGTAGAAATCGACG |
| | Nme2Cas9 | AAGAAGAAAACCCAATCCGACTAATCGACCTAGGAGTACGAGTATT |
| | cleavase | CGAACGAGCAGAAGTACCAAAAACAGGAGACTCACTAGCAATGGC |
| | | ACGACGACTAGCACGATCAGTACGACGACTAACACGACGACGAGC |
| | | ACACCGACTACTACGAGCACGACGACTACTAAAACGAGAAGGAGT |
| | | ACTACAAGCAGCAGACTTCGACGAAAACGGACTAATCAAATCACTA |
| | | CCAAACACACCATGACAACTACGAGCAGCAGCACTAGACCGAAAA |
| | | CTAACACCACTAGAATGATCAGCAGTACTACTACACCTAATCAAAC |
| | | ACCGAGGATACCTATCACAACGAAAAAACGAAGGAGAAACAGCAG |
| | | ACAAAGAACTAGGAGCACTACTAAAAGGAGTAGCAAACAACGCAC |
| | | ACGCACTACAAACAGGAGACTTCCGAACACCAGCAGAACTAGCAC |
| | | TAAACAAATTCGAAAAAGAATCAGGACACATCCGAAACCAACGAG |
| | | GAGACTACTCACACACATTCTCACGAAAAGACCTACAAGCAGAACT |
| | | AATCCTACTATTCGAAAAACAAAAAGAATTCGGAAACCCACACGTA |
| | | TCAGGAGGACTAAAAGAAGGAATCGAAACACTACTAATGACACAA |
| | | CGACCAGCACTATCAGGAGACGCAGTACAAAAAATGCTAGGACAC |
| | | TGCACATTCGAACCAGCAGAACCAAAAGCAGCAAAAAACACATAC |
| | | ACAGCAGAACGATTCATCTGACTAACAAAACTAAACAACCTACGAA |
| | | TCCTAGAACAAGGATCAGAACGACCACTAACAGACACAGAACGAG |
| | | CAACACTAATGGACGAACCATACCGAAAATCAAAACTAACATACG |
| | | CACAAGCACGAAAACTACTAGGACTAGAAGACACAGCATTCTTCAA |
| | | AGGACTACGATACGGAAAAGACAACGCAGAAGCATCAACACTAAT |
| | | GGAAATGAAAGCATACCACGCAATCTCACGAGCACTAGAAAAAGA |
| | | AGGACTAAAAGACAAAAAATCACCACTAAACCTATCATCAGAACT |
| | | ACAAGACGAAATCGGAACAGCATTCTCACTATTCAAAACAGACGA |
| | | AGACATCACAGGACGACTAAAAGACCGAGTACAACCAGAAATCCT |
| | | AGAAGCACTACTAAAACACATCTCATTCGACAAATTCGTACAAATC |
| | | TCACTAAAAGCACTACGACGAATCGTACCACTAATGGAACAAGGA |
| | | AAACGATACGACGAAGCATGCGCAGAAATCTACGGAGACCACTAC |
| | | GGAAAAAAAAACACAGAAGAAAAAATCTACCTACCACCAATCCCA |
| | | GCAGACGAAATCCGAAACCCAGTAGTACTACGAGCACTATCACAA |
| | | GCACGAAAAGTAATCAACGGAGTAGTACGACGATACGGATCACCA |
| | | GCACGAATCCACATCGAAACAGCACGAGAAGTAGGAAAATCATTC |
| | | AAAGACCGAAAAGAAATCGAAAAACGACAAGAAGAAAACCGAAA |
| | | AGACCGAGAAAAAGCAGCAGCAAAATTCCGAGAATACTTCCCAAA |
| | | CTTCGTAGGAGAACCAAAATCAAAAGACATCCTAAAACTACGACTA |
| | | TACGAACAACAACACGGAAAATGCCTATACTCAGGAAAAGAAATC |
| | | AACCTAGTACGACTAAACGAAAAAGGATACGTAGAAATCGACCAC |
| | | GCACTACCATTCTCACGAACATGAGACGACTCATTCAACAACAAAG |
| | | TACTAGTACTAGGATCAGAAAACCAAAACAAAGGAAACCAAACAC |
| | | CATACGAATACTTCAACGGAAAAGACAACTCACGAGAATGACAAG |
| | | AATTCAAAGCACGAGTAGAAACATCACGATTCCCACGATCAAAAA |
| | | AACAACGAATCCTACTACAAAAATTCGACGAAGACGGATTCAAAG |
| | | AATGCAACCTAAACGACACACGATACGTAAACCGATTCCTATGCCA |
| | | ATTCGTAGCAGACCACATCCTACTAACAGGAAAAGGAAAACGACG |
| | | AGTATTCGCATCAAACGGACAAATCACAAACCTACTACGAGGATTC |
| | | TGAGGACTACGAAAAGTACGAGCAGAAAACGACCGACACCACGCA |
| | | CTAGACGCAGTAGTAGTAGCATGCTCAACAGTAGCAATGCAACAAA |
| | | AAATCACACGATTCGTACGATACAAAGAAATGAACGCATTCGACGG |
| | | AAAAACAATCGACAAAGAAACAGGAAAAGTACTACACCAAAAAAC |
| | | ACACTTCCCACAACCATGAGAATTCTTCGCACAAGAAGTAATGATC |
| | | CGAGTATTCGGAAAACCAGACGGAAAACCAGAATTCGAAGAAGCA |
| | | GACACACCAGAAAAACTACGAACACTACTAGCAGAAAAACTATCA |
| | | TCACGACCAGAAGCAGTACACGAATACGTAACACCACTATTCGTAT |
| | | CACGAGCACCAAACCGAAAAATGTCAGGAGCACACAAAGACACAC |
| | | TACGATCAGCAAAACGATTCGTAAAACACAACGAAAAAATCTCAGT |
| | | AAAACGAGTATGACTAACAGAAATCAAACTAGCAGACCTAGAAAA |
| | | CATGGTAAACTACAAAAACGGACGAGAAATCGAACTATACGAAGC |
| | | ACTAAAAGCACGACTAGAAGCATACGGAGGAAACGCAAAACAAGC |
| | | ATTCGACCCAAAAGACAACCCATTCTACAAAAAAGGAGGACAACT |
| | | AGTAAAAGCAGTACGAGTAGAAAAAACACAAGAATCAGGAGTACT |
| | | ACTAAACAAAAAAAACGCATACACAATCGCAGACAACGGAGACAT |
| | | GGTACGAGTAGACGTATTCTGCAAAGTAGACAAAAAAGGAAAAAA |
| | | CCAATACTTCATCGTACCAATCTACGCATGACAAGTAGCAGAAAAC |
| | | ATCCTACCAGACATCGACTGCAAAGGATACCGAATCGACGACTCAT |
| | | ACACATTCTGCTTCTCACTACACAAATACGACCTAATCGCATTCCAA |
| | | AAAGACGAAAAATCAAAAGTAGAATTCGCATACTACATCAACTGC |
| | | GACTCATCAAACGGACGATTCTACCTAGCATGACACGACAAAGGAT |
| | | CAAAAGAACAACAATTCCGAATCTCAACACAAAACCTAGTACTAAT |
| | | CCAAAAATACCAAGTAAACGAACTAGGAAAAGAAATCCGACCATG |
| | | CCGACTAAAAAAACGACCACCAGTACGAUAA |
| 212 | Exemplary amino | MAAFKPNPINYILGLDIGIASVGWAMVEIDEEENPIRLIDLGVRVFERAE |
| | acid sequence of | VPKTGDSLAMARRLARSVRRLTRRRAHRLLRARRLLKREGVLQAADF |
| | Nme3Cas9 | DENGLIKSLPNTPWQLRAAALDRKLTPLEWSAVLLHLIKHRGYLSQRK |
| | cleavase | NEGETADKELGALLKGVADNAHALQTGDFRTPAELALNKFEKECGHI |
| | | RNQRGDYSHTFSRKDLQAELNLLFEKQKEFGNPHVSGGLKEGIETLLM |
| | | TQRPALSGDAVQKMLGHCTFEPAEPKAAKNTYTAERFIWLTKLNNLRI |
| | | LEQGSERPLTDTERATLMDEPYRKSKLTYAQARKLLSLEDTAFFKGLR |
| | | YGKDNAEASTLMEMKAYHTISRALEKEGLKDKKSPLNLSPELQDEIGT |
| | | AFSLFKTDEDITGRLKDRIQPEILEALLKHISFDKFVQISLKALRRIVPLM |
| | | EQGKRYDEACAEIYGDHYGKKNTEEKIYLPPIPADEIRNPVVLRALSQA |
| | | RKVINGVVRRYGSPARIHIETAREVGKSFKDRKEIEKRQEENRKDREKA |
| | | AAKFREYFPNFVGEPKSKDILKLRLYEQQHGKCLYSGKEINLGRLNEK |
| | | GYVEIDHALPFSRTWDDSFNNKVLVLGSENQNKGNQTPYEYFNGKDN |
| | | SREWQEFKARVETSRFPRSKKQRILLQKFDEDGFKERNLNDTRYVNRF |
| | | LCQFVADRMRLTGKGKKRVFASNGQITNLLRGFWGLRKVRAENDRH |
| | | HALDAVVVACSTVAMQQKITRFVRYKEMNAFDGKTIDKETGEVLHQ |
| | | KTHFPQPWEFFAQEVMIRVFGKPDGKPEFEEADTPEKLRTLLAEKLSSR |
| | | PEAVHEYVTPLFVSRAPNRKMSGQGHMETVKSAKRLDEGVSVLRVPL |
| | | TQLKLKDLEKMVNREREPKLYEALKARLEAHKDDPAKAFAEPFYKYD |
| | | KAGNRTQQVKAVRVEQVQKTGVWVRNHNGIADNATMVRVDVFEKG |
| | | DKYYLVPIYSWQVAKGILPDRAVVAYADEEDWTVIDESFRFKFVLYSN |
| | | DLIKVQLKKDSFLGYFSGLDRATGAISLREHDLEKSKGKDGMHRIGVK |
| | | TALSFQKYQIDEMGKEIRPCRLKKRPPVR |
| 213 | Exemplary | GCTGCTTTTAAGCCTAATCCTATTAATTATATTCTTGGTCTTGATATT |
| | coding sequence | GGTATTGCTTCTGTTGGTTGGGCTATGGTTGAGATTGATGAGGAGG |
| | encoding | AGAATCCTATTCGTCTTATTGATCTTGGTGTTCGTGTTTTTGAGCGT |
| | Nme3Cas9 | GCTGAGGTTCCTAAGACTGGTGATTCTCTTGCTATGGCTCGTCGTCT |
| | cleavase | TGCTCGTTCTGTTCGTCGTCTTACTCGTCGTCGTGCTCATCGTCTTCT |
| | | TCGTGCTCGTCGTCTTCTTAAGCGTGAGGGTGTTCTTCAGGCTGCTG |
| | | ATTTTGATGAGAATGGTCTTATTAAGTCTCTTCCTAATACTCCTTGG |
| | | CAGCTTCGTGCTGCTGCTCTTGATCGTAAGCTTACTCCTCTTGAGTG |
| | | GTCTGCTGTTCTTCTTCATCTTATTAAGCATCGTGGTTATCTTTCTCA |
| | | GCGTAAGAATGAGGGTGAGACTGCTGATAAGGAGCTTGGTGCTCTT |
| | | CTTAAGGGTGTTGCTGATAATGCTCATGCTCTTCAGACTGGTGATTT |
| | | TCGTACTCCTGCTGAGCTTGCTCTTAATAAGTTTGAGAAGGAGTGTG |
| | | GTCATATTCGTAATCAGCGTGGTGATTATTCTCATACTTTTTCTCGT |
| | | AAGGATCTTCAGGCTGAGCTTAATCTTCTTTTTGAGAAGCAGAAGG |
| | | AGTTTGGTAATCCTCATGTTTCTGGTGGTCTTAAGGAGGGTATTGAG |
| | | ACTCTTCTTATGACTCAGCGTCCTGCTCTTTCTGGTGATGCTGTTCA |
| | | GAAGATGCTTGGTCATTGTACTTTTGAGCCTGCTGAGCCTAAGGCTG |
| | | CTAAGAATACTTATACTGCTGAGCGTTTTATTTGGCTTACTAAGCTT |
| | | AATAATCTTCGTATTCTTGAGCAGGGTTCTGAGCGTCCTCTTACTGA |
| | | TACTGAGCGTGCTACTCTTATGGATGAGCCTTATCGTAAGTCTAAGC |
| | | TTACTTATGCTCAGGCTCGTAAGCTTCTTTCTCTTGAGGATACTGCT |
| | | TTTTTTAAGGGTCTTCGTTATGGTAAGGATAATGCTGAGGCTTCTAC |
| | | TCTTATGGAGATGAAGGCTTATCATACTATTTCTCGTGCTCTTGAGA |
| | | AGGAGGGTCTTAAGGATAAGAAGTCTCCTCTTAATCTTTCTCCTGAG |
| | | CTTCAGGATGAGATTGGTACTGCTTTTTCTCTTTTTAAGACTGATGA |
| | | GGATATTACTGGTCGTCTTAAGGATCGTATTCAGCCTGAGATTCTTG |
| | | AGGCTCTTCTTAAGCATATTTCTTTTGATAAGTTTGTTCAGATTTCTC |
| | | TTAAGGCTCTTCGTCGTATTGTTCCTCTTATGGAGCAGGGTAAGCGT |
| | | TATGATGAGGCTTGTGCTGAGATTTATGGTGATCATTATGGTAAGA |
| | | AGAATACTGAGGAGAAGATTTATCTTCCTCCTATTCCTGCTGATGAG |
| | | ATTCGTAATCCTGTTGTTCTTCGTGCTCTTTCTCAGGCTCGTAAGGTT |
| | | ATTAATGGTGTTGTTCGTCGTTATGGTTCTCCTGCTCGTATTCATATT |
| | | GAGACTGCTCGTGAGGTTGGTAAGTCTTTTAAGGATCGTAAGGAGA |
| | | TTGAGAAGCGTCAGGAGGAGAATCGTAAGGATCGTGAGAAGGCTG |
| | | CTGCTAAGTTTCGTGAGTATTTTCCTAATTTTGTTGGTGAGCCTAAG |
| | | TCTAAGGATATTCTTAAGCTTCGTCTTTATGAGCAGCAGCATGGTAA |
| | | GTGTCTTTATTCTGGTAAGGAGATTAATCTTGGTCGTCTTAATGAGA |
| | | AGGGTTATGTTGAGATTGATCATGCTCTTCCTTTTTCTCGTACTTGG |
| | | GATGATTCTTTTAATAATAAGGTTCTTGTTCTTGGTTCTGAGAATCA |
| | | GAATAAGGGTAATCAGACTCCTTATGAGTATTTTAATGGTAAGGAT |
| | | AATTCTCGTGAGTGGCAGGAGTTTAAGGCTCGTGTTGAGACTTCTC |
| | | GTTTTCCTCGTTCTAAGAAGCAGCGTATTCTTCTTCAGAAGTTTGAT |
| | | GAGGATGGTTTTAAGGAGCGTAATCTTAATGATACTCGTTATGTTA |
| | | ATCGTTTTCTTTGTCAGTTTGTTGCTGATCGTATGCGTCTTACTGGTA |
| | | AGGGTAAGAAGCGTGTTTTTGCTTCTAATGGTCAGATTACTAATCTT |
| | | CTTCGTGGTTTTTGGGGTCTTCGTAAGGTTCGTGCTGAGAATGATCG |
| | | TCATCATGCTCTTGATGCTGTTGTTGTTGCTTGTTCTACTGTTGCTAT |
| | | GCAGCAGAAGATTACTCGTTTTGTTCGTTATAAGGAGATGAATGCT |
| | | TTTGATGGTAAGACTATTGATAAGGAGACTGGTGAGGTTCTTCATC |
| | | AGAAGACTCATTTTCCTCAGCCTTGGGAGTTTTTTGCTCAGGAGGTT |
| | | ATGATTCGTGTTTTTGGTAAGCCTGATGGTAAGCCTGAGTTTGAGGA |
| | | GGCTGATACTCCTGAGAAGCTTCGTACTCTTCTTGCTGAGAAGCTTT |
| | | CTTCTCGTCCTGAGGCTGTTCATGAGTATGTTACTCCTCTTTTTGTTT |
| | | CTCGTGCTCCTAATCGTAAGATGTCTGGTCAGGGTCATATGGAGAC |
| | | TGTTAAGTCTGCTAAGCGTCTTGATGAGGGTGTTTCTGTTCTTCGTG |
| | | TTCCTCTTACTCAGCTTAAGCTTAAGGATCTTGAGAAGATGGTTAAT |
| | | CGTGAGCGTGAGCCTAAGCTTTATGAGGCTCTTAAGGCTCGTCTTG |
| | | AGGCTCATAAGGATGATCCTGCTAAGGCTTTTGCTGAGCCTTTTTAT |
| | | AAGTATGATAAGGCTGGTAATCGTACTCAGCAGGTTAAGGCTGTTC |
| | | GTGTTGAGCAGGTTCAGAAGACTGGTGTTTGGGTTCGTAATCATAA |
| | | TGGTATTGCTGATAATGCTACTATGGTTCGTGTTGATGTTTTTGAGA |
| | | AGGGTGATAAGTATTATCTTGTTCCTATTTATTCTTGGCAGGTTGCT |
| | | AAGGGTATTCTTCCTGATCGTGCTGTTGTTGCTTATGCTGATGAGGA |
| | | GGATTGGACTGTTATTGATGAGTCTTTTCGTTTTAAGTTTGTTCTTTA |
| | | TTCTAATGATCTTATTAAGGTTCAGCTTAAGAAGGATTCTTTTCTTG |
| | | GTTATTTTTCTGGTCTTGATCGTGCTACTGGTGCTATTTCTCTTCGTG |
| | | AGCATGATCTTGAGAAGTCTAAGGGTAAGGATGGTATGCATCGTAT |
| | | TGGTGTTAAGACTGCTCTTTCTTTTCAGAAGTATCAGATTGATGAGA |
| | | TGGGTAAGGAGATTCGTCCTTGTCGTCTTAAGAAGCGTCCTCCTGTT |
| | | CGT |
| 214 | Exemplary | GCCGCCTTCAAGCCCAACCCCATCAACTACATCCTGGGCCTGGACA |
| | coding sequence | TCGGCATCGCCTCCGTGGGCTGGGCCATGGTGGAGATCGACGAGGA |
| | encoding | GGAGAACCCCATCCGGCTGATCGACCTGGGCGTGCGGGTGTTCGAG |
| | Nme3Cas9 | CGGGCCGAGGTGCCCAAGACCGGCGACTCCCTGGCCATGGCCCGGC |
| | cleavase | GGCTGGCCCGGTCCGTGCGGCGGCTGACCCGGCGGCGGGCCCACCG |
| | | GCTGCTGCGGGCCCGGCGGCTGCTGAAGCGGGAGGGCGTGCTGCA |
| | | GGCCGCCGACTTCGACGAGAACGGCCTGATCAAGTCCCTGCCCAAC |
| | | ACCCCCTGGCAGCTGCGGGCCGCCGCCCTGGACCGGAAGCTGACCC |
| | | CCCTGGAGTGGTCCGCCGTGCTGCTGCACCTGATCAAGCACCGGGG |
| | | CTACCTGTCCCAGCGGAAGAACGAGGGCGAGACCGCCGACAAGGA |
| | | GCTGGGCGCCCTGCTGAAGGGCGTGGCCGACAACGCCCACGCCCTG |
| | | CAGACCGGCGACTTCCGGACCCCCGCCGAGCTGGCCCTGAACAAGT |
| | | TCGAGAAGGAGTGCGGCCACATCCGGAACCAGCGGGGCGACTACT |
| | | CCCACACCTTCTCCCGGAAGGACCTGCAGGCCGAGCTGAACCTGCT |
| | | GTTCGAGAAGCAGAAGGAGTTCGGCAACCCCCACGTGTCCGGCGGC |
| | | CTGAAGGAGGGCATCGAGACCCTGCTGATGACCCAGCGGCCCGCCC |
| | | TGTCCGGCGACGCCGTGCAGAAGATGCTGGGCCACTGCACCTTCGA |
| | | GCCCGCCGAGCCCAAGGCCGCCAAGAACACCTACACCGCCGAGCG |
| | | GTTCATCTGGCTGACCAAGCTGAACAACCTGCGGATCCTGGAGCAG |
| | | GGCTCCGAGCGGCCCCTGACCGACACCGAGCGGGCCACCCTGATGG |
| | | ACGAGCCCTACCGGAAGTCCAAGCTGACCTACGCCCAGGCCCGGAA |
| | | GCTGCTGTCCCTGGAGGACACCGCCTTCTTCAAGGGCCTGCGGTAC |
| | | GGCAAGGACAACGCCGAGGCCTCCACCCTGATGGAGATGAAGGCC |
| | | TACCACACCATCTCCCGGGCCCTGGAGAAGGAGGGCCTGAAGGAC |
| | | AAGAAGTCCCCCCTGAACCTGTCCCCCGAGCTGCAGGACGAGATCG |
| | | GCACCGCCTTCTCCCTGTTCAAGACCGACGAGGACATCACCGGCCG |
| | | GCTGAAGGACCGGATCCAGCCCGAGATCCTGGAGGCCCTGCTGAAG |
| | | CACATCTCCTTCGACAAGTTCGTGCAGATCTCCCTGAAGGCCCTGCG |
| | | GCGGATCGTGCCCCTGATGGAGCAGGGCAAGCGGTACGACGAGGC |
| | | CTGCGCCGAGATCTACGGCGACCACTACGGCAAGAAGAACACCGA |
| | | GGAGAAGATCTACCTGCCCCCCATCCCCGCCGACGAGATCCGGAAC |
| | | CCCGTGGTGCTGCGGGCCCTGTCCCAGGCCCGGAAGGTGATCAACG |
| | | GCGTGGTGCGGCGGTACGGCTCCCCCGCCCGGATCCACATCGAGAC |
| | | CGCCCGGGAGGTGGGCAAGTCCTTCAAGGACCGGAAGGAGATCGA |
| | | GAAGCGGCAGGAGGAGAACCGGAAGGACCGGGAGAAGGCCGCCG |
| | | CCAAGTTCCGGGAGTACTTCCCCAACTTCGTGGGCGAGCCCAAGTC |
| | | CAAGGACATCCTGAAGCTGCGGCTGTACGAGCAGCAGCACGGCAA |
| | | GTGCCTGTACTCCGGCAAGGAGATCAACCTGGGCCGGCTGAACGAG |
| | | AAGGGCTACGTGGAGATCGACCACGCCCTGCCCTTCTCCCGGACCT |
| | | GGGACGACTCCTTCAACAACAAGGTGCTGGTGCTGGGCTCCGAGAA |
| | | CCAGAACAAGGGCAACCAGACCCCCTACGAGTACTTCAACGGCAA |
| | | GGACAACTCCCGGGAGTGGCAGGAGTTCAAGGCCCGGGTGGAGAC |
| | | CTCCCGGTTCCCCCGGTCCAAGAAGCAGCGGATCCTGCTGCAGAAG |
| | | TTCGACGAGGACGGCTTCAAGGAGCGGAACCTGAACGACACCCGG |
| | | TACGTGAACCGGTTCCTGTGCCAGTTCGTGGCCGACCGGATGCGGC |
| | | TGACCGGCAAGGGCAAGAAGCGGGTGTTCGCCTCCAACGGCCAGA |
| | | TCACCAACCTGCTGCGGGGCTTCTGGGGCCTGCGGAAGGTGCGGGC |
| | | CGAGAACGACCGGCACCACGCCCTGGACGCCGTGGTGGTGGCCTGC |
| | | TCCACCGTGGCCATGCAGCAGAAGATCACCCGGTTCGTGCGGTACA |
| | | AGGAGATGAACGCCTTCGACGGCAAGACCATCGACAAGGAGACCG |
| | | GCGAGGTGCTGCACCAGAAGACCCACTTCCCCCAGCCCTGGGAGTT |
| | | CTTCGCCCAGGAGGTGATGATCCGGGTGTTCGGCAAGCCCGACGGC |
| | | AAGCCCGAGTTCGAGGAGGCCGACACCCCCGAGAAGCTGCGGACC |
| | | CTGCTGGCCGAGAAGCTGTCCTCCCGGCCCGAGGCCGTGCACGAGT |
| | | ACGTGACCCCCCTGTTCGTGTCCCGGGCCCCCAACCGGAAGATGTC |
| | | CGGCCAGGGCCACATGGAGACCGTGAAGTCCGCCAAGCGGCTGGA |
| | | CGAGGGCGTGTCCGTGCTGCGGGTGCCCCTGACCCAGCTGAAGCTG |
| | | AAGGACCTGGAGAAGATGGTGAACCGGGAGCGGGAGCCCAAGCTG |
| | | TACGAGGCCCTGAAGGCCCGGCTGGAGGCCCACAAGGACGACCCC |
| | | GCCAAGGCCTTCGCCGAGCCCTTCTACAAGTACGACAAGGCCGGCA |
| | | ACCGGACCCAGCAGGTGAAGGCCGTGCGGGTGGAGCAGGTGCAGA |
| | | AGACCGGCGTGTGGGTGCGGAACCACAACGGCATCGCCGACAACG |
| | | CCACCATGGTGCGGGTGGACGTGTTCGAGAAGGGCGACAAGTACTA |
| | | CCTGGTGCCCATCTACTCCTGGCAGGTGGCCAAGGGCATCCTGCCC |
| | | GACCGGGCCGTGGTGGCCTACGCCGACGAGGAGGACTGGACCGTG |
| | | ATCGACGAGTCCTTCCGGTTCAAGTTCGTGCTGTACTCCAACGACCT |
| | | GATCAAGGTGCAGCTGAAGAAGGACTCCTTCCTGGGCTACTTCTCC |
| | | GGCCTGGACCGGGCCACCGGCGCCATCTCCCTGCGGGAGCACGACC |
| | | TGGAGAAGTCCAAGGGCAAGGACGGCATGCACCGGATCGGCGTGA |
| | | AGACCGCCCTGTCCTTCCAGAAGTACCAGATCGACGAGATGGGCAA |
| | | GGAGATCCGGCCCTGCCGGCTGAAGAAGCGGCCCCCCGTGCGG |
| 215 | Exemplary | GCAGCATTCAAACCAAACCCAATCAACTACATCCTAGGACTAGACA |
| | coding sequence | TCGGAATCGCATCAGTAGGATGAGCAATGGTAGAAATCGACGAAG |
| | encoding | AAGAAAACCCAATCCGACTAATCGACCTAGGAGTACGAGTATTCGA |
| | Nme3Cas9 | ACGAGCAGAAGTACCAAAAACAGGAGACTCACTAGCAATGGCACG |
| | cleavase | ACGACTAGCACGATCAGTACGACGACTAACACGACGACGAGCACA |
| | | CCGACTACTACGAGCACGACGACTACTAAAACGAGAAGGAGTACT |
| | | ACAAGCAGCAGACTTCGACGAAAACGGACTAATCAAATCACTACC |
| | | AAACACACCATGACAACTACGAGCAGCAGCACTAGACCGAAAACT |
| | | AACACCACTAGAATGATCAGCAGTACTACTACACCTAATCAAACAC |
| | | CGAGGATACCTATCACAACGAAAAAACGAAGGAGAAACAGCAGAC |
| | | AAAGAACTAGGAGCACTACTAAAAGGAGTAGCAGACAACGCACAC |
| | | GCACTACAAACAGGAGACTTCCGAACACCAGCAGAACTAGCACTA |
| | | AACAAATTCGAAAAAGAATGCGGACACATCCGAAACCAACGAGGA |
| | | GACTACTCACACACATTCTCACGAAAAGACCTACAAGCAGAACTAA |
| | | ACCTACTATTCGAAAAACAAAAAGAATTCGGAAACCCACACGTATC |
| | | AGGAGGACTAAAAGAAGGAATCGAAACACTACTAATGACACAACG |
| | | ACCAGCACTATCAGGAGACGCAGTACAAAAAATGCTAGGACACTG |
| | | CACATTCGAACCAGCAGAACCAAAAGCAGCAAAAAACACATACAC |
| | | AGCAGAACGATTCATCTGACTAACAAAACTAAACAACCTACGAATC |
| | | CTAGAACAAGGATCAGAACGACCACTAACAGACACAGAACGAGCA |
| | | ACACTAATGGACGAACCATACCGAAAATCAAAACTAACATACGCA |
| | | CAAGCACGAAAACTACTATCACTAGAAGACACAGCATTCTTCAAAG |
| | | GACTACGATACGGAAAAGACAACGCAGAAGCATCAACACTAATGG |
| | | AAATGAAAGCATACCACACAATCTCACGAGCACTAGAAAAAGAAG |
| | | GACTAAAAGACAAAAAATCACCACTAAACCTATCACCAGAACTAC |
| | | AAGACGAAATCGGAACAGCATTCTCACTATTCAAAACAGACGAAG |
| | | ACATCACAGGACGACTAAAAGACCGAATCCAACCAGAAATCCTAG |
| | | AAGCACTACTAAAACACATCTCATTCGACAAATTCGTACAAATCTC |
| | | ACTAAAAGCACTACGACGAATCGTACCACTAATGGAACAAGGAAA |
| | | ACGATACGACGAAGCATGCGCAGAAATCTACGGAGACCACTACGG |
| | | AAAAAAAAACACAGAAGAAAAAATCTACCTACCACCAATCCCAGC |
| | | AGACGAAATCCGAAACCCAGTAGTACTACGAGCACTATCACAAGC |
| | | ACGAAAAGTAATCAACGGAGTAGTACGACGATACGGATCACCAGC |
| | | ACGAATCCACATCGAAACAGCACGAGAAGTAGGAAAATCATTCAA |
| | | AGACCGAAAAGAAATCGAAAAACGACAAGAAGAAAACCGAAAAG |
| | | ACCGAGAAAAAGCAGCAGCAAAATTCCGAGAATACTTCCCAAACTT |
| | | CGTAGGAGAACCAAAATCAAAAGACATCCTAAAACTACGACTATA |
| | | CGAACAACAACACGGAAAATGCCTATACTCAGGAAAAGAAATCAA |
| | | CCTAGGACGACTAAACGAAAAAGGATACGTAGAAATCGACCACGC |
| | | ACTACCATTCTCACGAACATGAGACGACTCATTCAACAACAAAGTA |
| | | CTAGTACTAGGATCAGAAAACCAAAACAAAGGAAACCAAACACCA |
| | | TACGAATACTTCAACGGAAAAGACAACTCACGAGAATGACAAGAA |
| | | TTCAAAGCACGAGTAGAAACATCACGATTCCCACGATCAAAAAAAC |
| | | AACGAATCCTACTACAAAAATTCGACGAAGACGGATTCAAAGAAC |
| | | GAAACCTAAACGACACACGATACGTAAACCGATTCCTATGCCAATT |
| | | CGTAGCAGACCGAATGCGACTAACAGGAAAAGGAAAAAAACGAGT |
| | | ATTCGCATCAAACGGACAAATCACAAACCTACTACGAGGATTCTGA |
| | | GGACTACGAAAAGTACGAGCAGAAAACGACCGACACCACGCACTA |
| | | GACGCAGTAGTAGTAGCATGCTCAACAGTAGCAATGCAACAAAAA |
| | | ATCACACGATTCGTACGATACAAAGAAATGAACGCATTCGACGGAA |
| | | AAACAATCGACAAAGAAACAGGAGAAGTACTACACCAAAAAACAC |
| | | ACTTCCCACAACCATGAGAATTCTTCGCACAAGAAGTAATGATCCG |
| | | AGTATTCGGAAAACCAGACGGAAAACCAGAATTCGAAGAAGCAGA |
| | | CACACCAGAAAAACTACGAACACTACTAGCAGAAAAACTATCATC |
| | | ACGACCAGAAGCAGTACACGAATACGTAACACCACTATTCGTATCA |
| | | CGAGCACCAAACCGAAAAATGTCAGGACAAGGACACATGGAAACA |
| | | GTAAAATCAGCAAAACGACTAGACGAAGGAGTATCAGTACTACGA |
| | | GTACCACTAACACAACTAAAACTAAAAGACCTAGAAAAAATGGTA |
| | | AACCGAGAACGAGAACCAAAACTATACGAAGCACTAAAAGCACGA |
| | | CTAGAAGCACACAAAGACGACCCAGCAAAAGCATTCGCAGAACCA |
| | | TTCTACAAATACGACAAAGCAGGAAACCGAACACAACAAGTAAAA |
| | | GCAGTACGAGTAGAACAAGTACAAAAAACAGGAGTATGAGTACGA |
| | | AACCACAACGGAATCGCAGACAACGCAACAATGGTACGAGTAGAC |
| | | GTATTCGAAAAAGGAGACAAATACTACCTAGTACCAATCTACTCAT |
| | | GACAAGTAGCAAAAGGAATCCTACCAGACCGAGCAGTAGTAGCAT |
| | | ACGCAGACGAAGAAGACTGAACAGTAATCGACGAATCATTCCGATT |
| | | CAAATTCGTACTATACTCAAACGACCTAATCAAAGTACAACTAAAA |
| | | AAAGACTCATTCCTAGGATACTTCTCAGGACTAGACCGAGCAACAG |
| | | GAGCAATCTCACTACGAGAACACGACCTAGAAAAATCAAAAGGAA |
| | | AAGACGGAATGCACCGAATCGGAGTAAAAACAGCACTATCATTCC |
| | | AAAAATACCAAATCGACGAAATGGGAAAAGAAATCCGACCATGCC |
| | | GACTAAAAAAACGACCACCAGTACGA |
| 216 | Exemplary open | ATGGCTGCTTTTAAGCCTAATCCTATTAATTATATTCTTGGTCTTGAT |
| | reading frame for | ATTGGTATTGCTTCTGTTGGTTGGGCTATGGTTGAGATTGATGAGGA |
| | Nme3Cas9 | GGAGAATCCTATTCGTCTTATTGATCTTGGTGTTCGTGTTTTTGAGC |
| | cleavase | GTGCTGAGGTTCCTAAGACTGGTGATTCTCTTGCTATGGCTCGTCGT |
| | | CTTGCTCGTTCTGTTCGTCGTCTTACTCGTCGTCGTGCTCATCGTCTT |
| | | CTTCGTGCTCGTCGTCTTCTTAAGCGTGAGGGTGTTCTTCAGGCTGC |
| | | TGATTTTGATGAGAATGGTCTTATTAAGTCTCTTCCTAATACTCCTT |
| | | GGCAGCTTCGTGCTGCTGCTCTTGATCGTAAGCTTACTCCTCTTGAG |
| | | TGGTCTGCTGTTCTTCTTCATCTTATTAAGCATCGTGGTTATCTTTCT |
| | | CAGCGTAAGAATGAGGGTGAGACTGCTGATAAGGAGCTTGGTGCTC |
| | | TTCTTAAGGGTGTTGCTGATAATGCTCATGCTCTTCAGACTGGTGAT |
| | | TTTCGTACTCCTGCTGAGCTTGCTCTTAATAAGTTTGAGAAGGAGTG |
| | | TGGTCATATTCGTAATCAGCGTGGTGATTATTCTCATACTTTTTCTC |
| | | GTAAGGATCTTCAGGCTGAGCTTAATCTTCTTTTTGAGAAGCAGAA |
| | | GGAGTTTGGTAATCCTCATGTTTCTGGTGGTCTTAAGGAGGGTATTG |
| | | AGACTCTTCTTATGACTCAGCGTCCTGCTCTTTCTGGTGATGCTGTT |
| | | CAGAAGATGCTTGGTCATTGTACTTTTGAGCCTGCTGAGCCTAAGG |
| | | CTGCTAAGAATACTTATACTGCTGAGCGTTTTATTTGGCTTACTAAG |
| | | CTTAATAATCTTCGTATTCTTGAGCAGGGTTCTGAGCGTCCTCTTAC |
| | | TGATACTGAGCGTGCTACTCTTATGGATGAGCCTTATCGTAAGTCTA |
| | | AGCTTACTTATGCTCAGGCTCGTAAGCTTCTTTCTCTTGAGGATACT |
| | | GCTTTTTTTAAGGGTCTTCGTTATGGTAAGGATAATGCTGAGGCTTC |
| | | TACTCTTATGGAGATGAAGGCTTATCATACTATTTCTCGTGCTCTTG |
| | | AGAAGGAGGGTCTTAAGGATAAGAAGTCTCCTCTTAATCTTTCTCCT |
| | | GAGCTTCAGGATGAGATTGGTACTGCTTTTTCTCTTTTTAAGACTGA |
| | | TGAGGATATTACTGGTCGTCTTAAGGATCGTATTCAGCCTGAGATTC |
| | | TTGAGGCTCTTCTTAAGCATATTTCTTTTGATAAGTTTGTTCAGATTT |
| | | CTCTTAAGGCTCTTCGTCGTATTGTTCCTCTTATGGAGCAGGGTAAG |
| | | CGTTATGATGAGGCTTGTGCTGAGATTTATGGTGATCATTATGGTAA |
| | | GAAGAATACTGAGGAGAAGATTTATCTTCCTCCTATTCCTGCTGATG |
| | | AGATTCGTAATCCTGTTGTTCTTCGTGCTCTTTCTCAGGCTCGTAAG |
| | | GTTATTAATGGTGTTGTTCGTCGTTATGGTTCTCCTGCTCGTATTCAT |
| | | ATTGAGACTGCTCGTGAGGTTGGTAAGTCTTTTAAGGATCGTAAGG |
| | | AGATTGAGAAGCGTCAGGAGGAGAATCGTAAGGATCGTGAGAAGG |
| | | CTGCTGCTAAGTTTCGTGAGTATTTTCCTAATTTTGTTGGTGAGCCT |
| | | AAGTCTAAGGATATTCTTAAGCTTCGTCTTTATGAGCAGCAGCATG |
| | | GTAAGTGTCTTTATTCTGGTAAGGAGATTAATCTTGGTCGTCTTAAT |
| | | GAGAAGGGTTATGTTGAGATTGATCATGCTCTTCCTTTTTCTCGTAC |
| | | TTGGGATGATTCTTTTAATAATAAGGTTCTTGTTCTTGGTTCTGAGA |
| | | ATCAGAATAAGGGTAATCAGACTCCTTATGAGTATTTTAATGGTAA |
| | | GGATAATTCTCGTGAGTGGCAGGAGTTTAAGGCTCGTGTTGAGACT |
| | | TCTCGTTTTCCTCGTTCTAAGAAGCAGCGTATTCTTCTTCAGAAGTT |
| | | TGATGAGGATGGTTTTAAGGAGCGTAATCTTAATGATACTCGTTAT |
| | | GTTAATCGTTTTCTTTGTCAGTTTGTTGCTGATCGTATGCGTCTTACT |
| | | GGTAAGGGTAAGAAGCGTGTTTTTGCTTCTAATGGTCAGATTACTA |
| | | ATCTTCTTCGTGGTTTTTGGGGTCTTCGTAAGGTTCGTGCTGAGAAT |
| | | GATCGTCATCATGCTCTTGATGCTGTTGTTGTTGCTTGTTCTACTGTT |
| | | GCTATGCAGCAGAAGATTACTCGTTTTGTTCGTTATAAGGAGATGA |
| | | ATGCTTTTGATGGTAAGACTATTGATAAGGAGACTGGTGAGGTTCT |
| | | TCATCAGAAGACTCATTTTCCTCAGCCTTGGGAGTTTTTTGCTCAGG |
| | | AGGTTATGATTCGTGTTTTTGGTAAGCCTGATGGTAAGCCTGAGTTT |
| | | GAGGAGGCTGATACTCCTGAGAAGCTTCGTACTCTTCTTGCTGAGA |
| | | AGCTTTCTTCTCGTCCTGAGGCTGTTCATGAGTATGTTACTCCTCTTT |
| | | TTGTTTCTCGTGCTCCTAATCGTAAGATGTCTGGTCAGGGTCATATG |
| | | GAGACTGTTAAGTCTGCTAAGCGTCTTGATGAGGGTGTTTCTGTTCT |
| | | TCGTGTTCCTCTTACTCAGCTTAAGCTTAAGGATCTTGAGAAGATGG |
| | | TTAATCGTGAGCGTGAGCCTAAGCTTTATGAGGCTCTTAAGGCTCGT |
| | | CTTGAGGCTCATAAGGATGATCCTGCTAAGGCTTTTGCTGAGCCTTT |
| | | TTATAAGTATGATAAGGCTGGTAATCGTACTCAGCAGGTTAAGGCT |
| | | GTTCGTGTTGAGCAGGTTCAGAAGACTGGTGTTTGGGTTCGTAATC |
| | | ATAATGGTATTGCTGATAATGCTACTATGGTTCGTGTTGATGTTTTT |
| | | GAGAAGGGTGATAAGTATTATCTTGTTCCTATTTATTCTTGGCAGGT |
| | | TGCTAAGGGTATTCTTCCTGATCGTGCTGTTGTTGCTTATGCTGATG |
| | | AGGAGGATTGGACTGTTATTGATGAGTCTTTTCGTTTTAAGTTTGTT |
| | | CTTTATTCTAATGATCTTATTAAGGTTCAGCTTAAGAAGGATTCTTT |
| | | TCTTGGTTATTTTTCTGGTCTTGATCGTGCTACTGGTGCTATTTCTCT |
| | | TCGTGAGCATGATCTTGAGAAGTCTAAGGGTAAGGATGGTATGCAT |
| | | CGTATTGGTGTTAAGACTGCTCTTTCTTTTCAGAAGTATCAGATTGA |
| | | TGAGATGGGTAAGGAGATTCGTCCTTGTCGTCTTAAGAAGCGTCCT |
| | | CCTGTTCGTUGA |
| 217 | Exemplary open | ATGGCCGCCTTCAAGCCCAACCCCATCAACTACATCCTGGGCCTGG |
| | reading frame for | ACATCGGCATCGCCTCCGTGGGCTGGGCCATGGTGGAGATCGACGA |
| | Nme3Cas9 | GGAGGAGAACCCCATCCGGCTGATCGACCTGGGCGTGCGGGTGTTC |
| | cleavase | GAGCGGGCCGAGGTGCCCAAGACCGGCGACTCCCTGGCCATGGCCC |
| | | GGCGGCTGGCCCGGTCCGTGCGGCGGCTGACCCGGCGGCGGGCCCA |
| | | CCGGCTGCTGCGGGCCCGGCGGCTGCTGAAGCGGGAGGGCGTGCTG |
| | | CAGGCCGCCGACTTCGACGAGAACGGCCTGATCAAGTCCCTGCCCA |
| | | ACACCCCCTGGCAGCTGCGGGCCGCCGCCCTGGACCGGAAGCTGAC |
| | | CCCCCTGGAGTGGTCCGCCGTGCTGCTGCACCTGATCAAGCACCGG |
| | | GGCTACCTGTCCCAGCGGAAGAACGAGGGCGAGACCGCCGACAAG |
| | | GAGCTGGGCGCCCTGCTGAAGGGCGTGGCCGACAACGCCCACGCCC |
| | | TGCAGACCGGCGACTTCCGGACCCCCGCCGAGCTGGCCCTGAACAA |
| | | GTTCGAGAAGGAGTGCGGCCACATCCGGAACCAGCGGGGCGACTA |
| | | CTCCCACACCTTCTCCCGGAAGGACCTGCAGGCCGAGCTGAACCTG |
| | | CTGTTCGAGAAGCAGAAGGAGTTCGGCAACCCCCACGTGTCCGGCG |
| | | GCCTGAAGGAGGGCATCGAGACCCTGCTGATGACCCAGCGGCCCGC |
| | | CCTGTCCGGCGACGCCGTGCAGAAGATGCTGGGCCACTGCACCTTC |
| | | GAGCCCGCCGAGCCCAAGGCCGCCAAGAACACCTACACCGCCGAG |
| | | CGGTTCATCTGGCTGACCAAGCTGAACAACCTGCGGATCCTGGAGC |
| | | AGGGCTCCGAGCGGCCCCTGACCGACACCGAGCGGGCCACCCTGAT |
| | | GGACGAGCCCTACCGGAAGTCCAAGCTGACCTACGCCCAGGCCCGG |
| | | AAGCTGCTGTCCCTGGAGGACACCGCCTTCTTCAAGGGCCTGCGGT |
| | | ACGGCAAGGACAACGCCGAGGCCTCCACCCTGATGGAGATGAAGG |
| | | CCTACCACACCATCTCCCGGGCCCTGGAGAAGGAGGGCCTGAAGGA |
| | | CAAGAAGTCCCCCCTGAACCTGTCCCCCGAGCTGCAGGACGAGATC |
| | | GGCACCGCCTTCTCCCTGTTCAAGACCGACGAGGACATCACCGGCC |
| | | GGCTGAAGGACCGGATCCAGCCCGAGATCCTGGAGGCCCTGCTGAA |
| | | GCACATCTCCTTCGACAAGTTCGTGCAGATCTCCCTGAAGGCCCTGC |
| | | GGCGGATCGTGCCCCTGATGGAGCAGGGCAAGCGGTACGACGAGG |
| | | CCTGCGCCGAGATCTACGGCGACCACTACGGCAAGAAGAACACCG |
| | | AGGAGAAGATCTACCTGCCCCCCATCCCCGCCGACGAGATCCGGAA |
| | | CCCCGTGGTGCTGCGGGCCCTGTCCCAGGCCCGGAAGGTGATCAAC |
| | | GGCGTGGTGCGGCGGTACGGCTCCCCCGCCCGGATCCACATCGAGA |
| | | CCGCCCGGGAGGTGGGCAAGTCCTTCAAGGACCGGAAGGAGATCG |
| | | AGAAGCGGCAGGAGGAGAACCGGAAGGACCGGGAGAAGGCCGCC |
| | | GCCAAGTTCCGGGAGTACTTCCCCAACTTCGTGGGCGAGCCCAAGT |
| | | CCAAGGACATCCTGAAGCTGCGGCTGTACGAGCAGCAGCACGGCA |
| | | AGTGCCTGTACTCCGGCAAGGAGATCAACCTGGGCCGGCTGAACGA |
| | | GAAGGGCTACGTGGAGATCGACCACGCCCTGCCCTTCTCCCGGACC |
| | | TGGGACGACTCCTTCAACAACAAGGTGCTGGTGCTGGGCTCCGAGA |
| | | ACCAGAACAAGGGCAACCAGACCCCCTACGAGTACTTCAACGGCA |
| | | AGGACAACTCCCGGGAGTGGCAGGAGTTCAAGGCCCGGGTGGAGA |
| | | CCTCCCGGTTCCCCCGGTCCAAGAAGCAGCGGATCCTGCTGCAGAA |
| | | GTTCGACGAGGACGGCTTCAAGGAGCGGAACCTGAACGACACCCG |
| | | GTACGTGAACCGGTTCCTGTGCCAGTTCGTGGCCGACCGGATGCGG |
| | | CTGACCGGCAAGGGCAAGAAGCGGGTGTTCGCCTCCAACGGCCAG |
| | | ATCACCAACCTGCTGCGGGGCTTCTGGGGCCTGCGGAAGGTGCGGG |
| | | CCGAGAACGACCGGCACCACGCCCTGGACGCCGTGGTGGTGGCCTG |
| | | CTCCACCGTGGCCATGCAGCAGAAGATCACCCGGTTCGTGCGGTAC |
| | | AAGGAGATGAACGCCTTCGACGGCAAGACCATCGACAAGGAGACC |
| | | GGCGAGGTGCTGCACCAGAAGACCCACTTCCCCCAGCCCTGGGAGT |
| | | TCTTCGCCCAGGAGGTGATGATCCGGGTGTTCGGCAAGCCCGACGG |
| | | CAAGCCCGAGTTCGAGGAGGCCGACACCCCCGAGAAGCTGCGGAC |
| | | CCTGCTGGCCGAGAAGCTGTCCTCCCGGCCCGAGGCCGTGCACGAG |
| | | TACGTGACCCCCCTGTTCGTGTCCCGGGCCCCCAACCGGAAGATGT |
| | | CCGGCCAGGGCCACATGGAGACCGTGAAGTCCGCCAAGCGGCTGG |
| | | ACGAGGGCGTGTCCGTGCTGCGGGTGCCCCTGACCCAGCTGAAGCT |
| | | GAAGGACCTGGAGAAGATGGTGAACCGGGAGCGGGAGCCCAAGCT |
| | | GTACGAGGCCCTGAAGGCCCGGCTGGAGGCCCACAAGGACGACCC |
| | | CGCCAAGGCCTTCGCCGAGCCCTTCTACAAGTACGACAAGGCCGGC |
| | | AACCGGACCCAGCAGGTGAAGGCCGTGCGGGTGGAGCAGGTGCAG |
| | | AAGACCGGCGTGTGGGTGCGGAACCACAACGGCATCGCCGACAAC |
| | | GCCACCATGGTGCGGGTGGACGTGTTCGAGAAGGGCGACAAGTACT |
| | | ACCTGGTGCCCATCTACTCCTGGCAGGTGGCCAAGGGCATCCTGCC |
| | | CGACCGGGCCGTGGTGGCCTACGCCGACGAGGAGGACTGGACCGT |
| | | GATCGACGAGTCCTTCCGGTTCAAGTTCGTGCTGTACTCCAACGACC |
| | | TGATCAAGGTGCAGCTGAAGAAGGACTCCTTCCTGGGCTACTTCTC |
| | | CGGCCTGGACCGGGCCACCGGCGCCATCTCCCTGCGGGAGCACGAC |
| | | CTGGAGAAGTCCAAGGGCAAGGACGGCATGCACCGGATCGGCGTG |
| | | AAGACCGCCCTGTCCTTCCAGAAGTACCAGATCGACGAGATGGGCA |
| | | AGGAGATCCGGCCCTGCCGGCTGAAGAAGCGGCCCCCCGTGCGGU |
| | | GA |
| 218 | Exemplary open | ATGGCAGCATTCAAACCAAACCCAATCAACTACATCCTAGGACTAG |
| | reading frame for | ACATCGGAATCGCATCAGTAGGATGAGCAATGGTAGAAATCGACG |
| | Nme3Cas9 | AAGAAGAAAACCCAATCCGACTAATCGACCTAGGAGTACGAGTATT |
| | cleavase | CGAACGAGCAGAAGTACCAAAAACAGGAGACTCACTAGCAATGGC |
| | | ACGACGACTAGCACGATCAGTACGACGACTAACACGACGACGAGC |
| | | ACACCGACTACTACGAGCACGACGACTACTAAAACGAGAAGGAGT |
| | | ACTACAAGCAGCAGACTTCGACGAAAACGGACTAATCAAATCACTA |
| | | CCAAACACACCATGACAACTACGAGCAGCAGCACTAGACCGAAAA |
| | | CTAACACCACTAGAATGATCAGCAGTACTACTACACCTAATCAAAC |
| | | ACCGAGGATACCTATCACAACGAAAAAACGAAGGAGAAACAGCAG |
| | | ACAAAGAACTAGGAGCACTACTAAAAGGAGTAGCAGACAACGCAC |
| | | ACGCACTACAAACAGGAGACTTCCGAACACCAGCAGAACTAGCAC |
| | | TAAACAAATTCGAAAAAGAATGCGGACACATCCGAAACCAACGAG |
| | | GAGACTACTCACACACATTCTCACGAAAAGACCTACAAGCAGAACT |
| | | AAACCTACTATTCGAAAAACAAAAAGAATTCGGAAACCCACACGT |
| | | ATCAGGAGGACTAAAAGAAGGAATCGAAACACTACTAATGACACA |
| | | ACGACCAGCACTATCAGGAGACGCAGTACAAAAAATGCTAGGACA |
| | | CTGCACATTCGAACCAGCAGAACCAAAAGCAGCAAAAAACACATA |
| | | CACAGCAGAACGATTCATCTGACTAACAAAACTAAACAACCTACGA |
| | | ATCCTAGAACAAGGATCAGAACGACCACTAACAGACACAGAACGA |
| | | GCAACACTAATGGACGAACCATACCGAAAATCAAAACTAACATAC |
| | | GCACAAGCACGAAAACTACTATCACTAGAAGACACAGCATTCTTCA |
| | | AAGGACTACGATACGGAAAAGACAACGCAGAAGCATCAACACTAA |
| | | TGGAAATGAAAGCATACCACACAATCTCACGAGCACTAGAAAAAG |
| | | AAGGACTAAAAGACAAAAAATCACCACTAAACCTATCACCAGAAC |
| | | TACAAGACGAAATCGGAACAGCATTCTCACTATTCAAAACAGACGA |
| | | AGACATCACAGGACGACTAAAAGACCGAATCCAACCAGAAATCCT |
| | | AGAAGCACTACTAAAACACATCTCATTCGACAAATTCGTACAAATC |
| | | TCACTAAAAGCACTACGACGAATCGTACCACTAATGGAACAAGGA |
| | | AAACGATACGACGAAGCATGCGCAGAAATCTACGGAGACCACTAC |
| | | GGAAAAAAAAACACAGAAGAAAAAATCTACCTACCACCAATCCCA |
| | | GCAGACGAAATCCGAAACCCAGTAGTACTACGAGCACTATCACAA |
| | | GCACGAAAAGTAATCAACGGAGTAGTACGACGATACGGATCACCA |
| | | GCACGAATCCACATCGAAACAGCACGAGAAGTAGGAAAATCATTC |
| | | AAAGACCGAAAAGAAATCGAAAAACGACAAGAAGAAAACCGAAA |
| | | AGACCGAGAAAAAGCAGCAGCAAAATTCCGAGAATACTTCCCAAA |
| | | CTTCGTAGGAGAACCAAAATCAAAAGACATCCTAAAACTACGACTA |
| | | TACGAACAACAACACGGAAAATGCCTATACTCAGGAAAAGAAATC |
| | | AACCTAGGACGACTAAACGAAAAAGGATACGTAGAAATCGACCAC |
| | | GCACTACCATTCTCACGAACATGAGACGACTCATTCAACAACAAAG |
| | | TACTAGTACTAGGATCAGAAAACCAAAACAAAGGAAACCAAACAC |
| | | CATACGAATACTTCAACGGAAAAGACAACTCACGAGAATGACAAG |
| | | AATTCAAAGCACGAGTAGAAACATCACGATTCCCACGATCAAAAA |
| | | AACAACGAATCCTACTACAAAAATTCGACGAAGACGGATTCAAAG |
| | | AACGAAACCTAAACGACACACGATACGTAAACCGATTCCTATGCCA |
| | | ATTCGTAGCAGACCGAATGCGACTAACAGGAAAAGGAAAAAAACG |
| | | AGTATTCGCATCAAACGGACAAATCACAAACCTACTACGAGGATTC |
| | | TGAGGACTACGAAAAGTACGAGCAGAAAACGACCGACACCACGCA |
| | | CTAGACGCAGTAGTAGTAGCATGCTCAACAGTAGCAATGCAACAAA |
| | | AAATCACACGATTCGTACGATACAAAGAAATGAACGCATTCGACGG |
| | | AAAAACAATCGACAAAGAAACAGGAGAAGTACTACACCAAAAAAC |
| | | ACACTTCCCACAACCATGAGAATTCTTCGCACAAGAAGTAATGATC |
| | | CGAGTATTCGGAAAACCAGACGGAAAACCAGAATTCGAAGAAGCA |
| | | GACACACCAGAAAAACTACGAACACTACTAGCAGAAAAACTATCA |
| | | TCACGACCAGAAGCAGTACACGAATACGTAACACCACTATTCGTAT |
| | | CACGAGCACCAAACCGAAAAATGTCAGGACAAGGACACATGGAAA |
| | | CAGTAAAATCAGCAAAACGACTAGACGAAGGAGTATCAGTACTAC |
| | | GAGTACCACTAACACAACTAAAACTAAAAGACCTAGAAAAAATGG |
| | | TAAACCGAGAACGAGAACCAAAACTATACGAAGCACTAAAAGCAC |
| | | GACTAGAAGCACACAAAGACGACCCAGCAAAAGCATTCGCAGAAC |
| | | CATTCTACAAATACGACAAAGCAGGAAACCGAACACAACAAGTAA |
| | | AAGCAGTACGAGTAGAACAAGTACAAAAAACAGGAGTATGAGTAC |
| | | GAAACCACAACGGAATCGCAGACAACGCAACAATGGTACGAGTAG |
| | | ACGTATTCGAAAAAGGAGACAAATACTACCTAGTACCAATCTACTC |
| | | ATGACAAGTAGCAAAAGGAATCCTACCAGACCGAGCAGTAGTAGC |
| | | ATACGCAGACGAAGAAGACTGAACAGTAATCGACGAATCATTCCG |
| | | ATTCAAATTCGTACTATACTCAAACGACCTAATCAAAGTACAACTA |
| | | AAAAAAGACTCATTCCTAGGATACTTCTCAGGACTAGACCGAGCAA |
| | | CAGGAGCAATCTCACTACGAGAACACGACCTAGAAAAATCAAAAG |
| | | GAAAAGACGGAATGCACCGAATCGGAGTAAAAACAGCACTATCAT |
| | | TCCAAAAATACCAAATCGACGAAATGGGAAAAGAAATCCGACCAT |
| | | GCCGACTAAAAAAACGACCACCAGTACGAUAA |
| 219 | Exemplary amino | MAAFKPNPINYILGLDIGIASVGWAMVEIDEEENPIRLIDLGVRVFERAE |
| | acid sequence of | VPKTGDSLAMARRLARSVRRLTRRRAHRLLRARRLLKREGVLQAADF |
| | Nme3Cas9 HNH | DENGLIKSLPNTPWQLRAAALDRKLTPLEWSAVLLHLIKHRGYLSQRK |
| | nickase | NEGETADKELGALLKGVADNAHALQTGDFRTPAELALNKFEKECGHI |
| | | RNQRGDYSHTFSRKDLQAELNLLFEKQKEFGNPHVSGGLKEGIETLLM |
| | | TQRPALSGDAVQKMLGHCTFEPAEPKAAKNTYTAERFIWLTKLNNLRI |
| | | LEQGSERPLTDTERATLMDEPYRKSKLTYAQARKLLSLEDTAFFKGLR |
| | | YGKDNAEASTLMEMKAYHTISRALEKEGLKDKKSPLNLSPELQDEIGT |
| | | AFSLFKTDEDITGRLKDRIQPEILEALLKHISFDKFVQISLKALRRIVPLM |
| | | EQGKRYDEACAEIYGDHYGKKNTEEKIYLPPIPADEIRNPVVLRALSQA |
| | | RKVINGVVRRYGSPARIHIETAREVGKSFKDRKEIEKRQEENRKDREKA |
| | | AAKFREYFPNFVGEPKSKDILKLRLYEQQHGKCLYSGKEINLGRLNEK |
| | | GYVEIDAALPFSRTWDDSFNNKVLVLGSENQNKGNQTPYEYFNGKDN |
| | | SREWQEFKARVETSRFPRSKKQRILLQKFDEDGFKERNLNDTRYVNRF |
| | | LCQFVADRMRLTGKGKKRVFASNGQITNLLRGFWGLRKVRAENDRH |
| | | HALDAVVVACSTVAMQQKITRFVRYKEMNAFDGKTIDKETGEVLHQ |
| | | KTHFPQPWEFFAQEVMIRVFGKPDGKPEFEEADTPEKLRTLLAEKLSSR |
| | | PEAVHEYVTPLFVSRAPNRKMSGQGHMETVKSAKRLDEGVSVLRVPL |
| | | TQLKLKDLEKMVNREREPKLYEALKARLEAHKDDPAKAFAEPFYKYD |
| | | KAGNRTQQVKAVRVEQVQKTGVWVRNHNGIADNATMVRVDVFEKG |
| | | DKYYLVPIYSWQVAKGILPDRAVVAYADEEDWTVIDESFRFKFVLYSN |
| | | DLIKVQLKKDSFLGYFSGLDRATGAISLREHDLEKSKGKDGMHRIGVK |
| | | TALSFQKYQIDEMGKEIRPCRLKKRPPVR |
| 220 | Exemplary | GCTGCTTTTAAGCCTAATCCTATTAATTATATTCTTGGTCTTGATATT |
| | coding sequence | GGTATTGCTTCTGTTGGTTGGGCTATGGTTGAGATTGATGAGGAGG |
| | encoding | AGAATCCTATTCGTCTTATTGATCTTGGTGTTCGTGTTTTTGAGCGT |
| | Nme3Cas9 HNH | GCTGAGGTTCCTAAGACTGGTGATTCTCTTGCTATGGCTCGTCGTCT |
| | nickase | TGCTCGTTCTGTTCGTCGTCTTACTCGTCGTCGTGCTCATCGTCTTCT |
| | | TCGTGCTCGTCGTCTTCTTAAGCGTGAGGGTGTTCTTCAGGCTGCTG |
| | | ATTTTGATGAGAATGGTCTTATTAAGTCTCTTCCTAATACTCCTTGG |
| | | CAGCTTCGTGCTGCTGCTCTTGATCGTAAGCTTACTCCTCTTGAGTG |
| | | GTCTGCTGTTCTTCTTCATCTTATTAAGCATCGTGGTTATCTTTCTCA |
| | | GCGTAAGAATGAGGGTGAGACTGCTGATAAGGAGCTTGGTGCTCTT |
| | | CTTAAGGGTGTTGCTGATAATGCTCATGCTCTTCAGACTGGTGATTT |
| | | TCGTACTCCTGCTGAGCTTGCTCTTAATAAGTTTGAGAAGGAGTGTG |
| | | GTCATATTCGTAATCAGCGTGGTGATTATTCTCATACTTTTTCTCGT |
| | | AAGGATCTTCAGGCTGAGCTTAATCTTCTTTTTGAGAAGCAGAAGG |
| | | AGTTTGGTAATCCTCATGTTTCTGGTGGTCTTAAGGAGGGTATTGAG |
| | | ACTCTTCTTATGACTCAGCGTCCTGCTCTTTCTGGTGATGCTGTTCA |
| | | GAAGATGCTTGGTCATTGTACTTTTGAGCCTGCTGAGCCTAAGGCTG |
| | | CTAAGAATACTTATACTGCTGAGCGTTTTATTTGGCTTACTAAGCTT |
| | | AATAATCTTCGTATTCTTGAGCAGGGTTCTGAGCGTCCTCTTACTGA |
| | | TACTGAGCGTGCTACTCTTATGGATGAGCCTTATCGTAAGTCTAAGC |
| | | TTACTTATGCTCAGGCTCGTAAGCTTCTTTCTCTTGAGGATACTGCT |
| | | TTTTTTAAGGGTCTTCGTTATGGTAAGGATAATGCTGAGGCTTCTAC |
| | | TCTTATGGAGATGAAGGCTTATCATACTATTTCTCGTGCTCTTGAGA |
| | | AGGAGGGTCTTAAGGATAAGAAGTCTCCTCTTAATCTTTCTCCTGAG |
| | | CTTCAGGATGAGATTGGTACTGCTTTTTCTCTTTTTAAGACTGATGA |
| | | GGATATTACTGGTCGTCTTAAGGATCGTATTCAGCCTGAGATTCTTG |
| | | AGGCTCTTCTTAAGCATATTTCTTTTGATAAGTTTGTTCAGATTTCTC |
| | | TTAAGGCTCTTCGTCGTATTGTTCCTCTTATGGAGCAGGGTAAGCGT |
| | | TATGATGAGGCTTGTGCTGAGATTTATGGTGATCATTATGGTAAGA |
| | | AGAATACTGAGGAGAAGATTTATCTTCCTCCTATTCCTGCTGATGAG |
| | | ATTCGTAATCCTGTTGTTCTTCGTGCTCTTTCTCAGGCTCGTAAGGTT |
| | | ATTAATGGTGTTGTTCGTCGTTATGGTTCTCCTGCTCGTATTCATATT |
| | | GAGACTGCTCGTGAGGTTGGTAAGTCTTTTAAGGATCGTAAGGAGA |
| | | TTGAGAAGCGTCAGGAGGAGAATCGTAAGGATCGTGAGAAGGCTG |
| | | CTGCTAAGTTTCGTGAGTATTTTCCTAATTTTGTTGGTGAGCCTAAG |
| | | TCTAAGGATATTCTTAAGCTTCGTCTTTATGAGCAGCAGCATGGTAA |
| | | GTGTCTTTATTCTGGTAAGGAGATTAATCTTGGTCGTCTTAATGAGA |
| | | AGGGTTATGTTGAGATTGATGCTGCTCTTCCTTTTTCTCGTACTTGG |
| | | GATGATTCTTTTAATAATAAGGTTCTTGTTCTTGGTTCTGAGAATCA |
| | | GAATAAGGGTAATCAGACTCCTTATGAGTATTTTAATGGTAAGGAT |
| | | AATTCTCGTGAGTGGCAGGAGTTTAAGGCTCGTGTTGAGACTTCTC |
| | | GTTTTCCTCGTTCTAAGAAGCAGCGTATTCTTCTTCAGAAGTTTGAT |
| | | GAGGATGGTTTTAAGGAGCGTAATCTTAATGATACTCGTTATGTTA |
| | | ATCGTTTTCTTTGTCAGTTTGTTGCTGATCGTATGCGTCTTACTGGTA |
| | | AGGGTAAGAAGCGTGTTTTTGCTTCTAATGGTCAGATTACTAATCTT |
| | | CTTCGTGGTTTTTGGGGTCTTCGTAAGGTTCGTGCTGAGAATGATCG |
| | | TCATCATGCTCTTGATGCTGTTGTTGTTGCTTGTTCTACTGTTGCTAT |
| | | GCAGCAGAAGATTACTCGTTTTGTTCGTTATAAGGAGATGAATGCT |
| | | TTTGATGGTAAGACTATTGATAAGGAGACTGGTGAGGTTCTTCATC |
| | | AGAAGACTCATTTTCCTCAGCCTTGGGAGTTTTTTGCTCAGGAGGTT |
| | | ATGATTCGTGTTTTTGGTAAGCCTGATGGTAAGCCTGAGTTTGAGGA |
| | | GGCTGATACTCCTGAGAAGCTTCGTACTCTTCTTGCTGAGAAGCTTT |
| | | CTTCTCGTCCTGAGGCTGTTCATGAGTATGTTACTCCTCTTTTTGTTT |
| | | CTCGTGCTCCTAATCGTAAGATGTCTGGTCAGGGTCATATGGAGAC |
| | | TGTTAAGTCTGCTAAGCGTCTTGATGAGGGTGTTTCTGTTCTTCGTG |
| | | TTCCTCTTACTCAGCTTAAGCTTAAGGATCTTGAGAAGATGGTTAAT |
| | | CGTGAGCGTGAGCCTAAGCTTTATGAGGCTCTTAAGGCTCGTCTTG |
| | | AGGCTCATAAGGATGATCCTGCTAAGGCTTTTGCTGAGCCTTTTTAT |
| | | AAGTATGATAAGGCTGGTAATCGTACTCAGCAGGTTAAGGCTGTTC |
| | | GTGTTGAGCAGGTTCAGAAGACTGGTGTTTGGGTTCGTAATCATAA |
| | | TGGTATTGCTGATAATGCTACTATGGTTCGTGTTGATGTTTTTGAGA |
| | | AGGGTGATAAGTATTATCTTGTTCCTATTTATTCTTGGCAGGTTGCT |
| | | AAGGGTATTCTTCCTGATCGTGCTGTTGTTGCTTATGCTGATGAGGA |
| | | GGATTGGACTGTTATTGATGAGTCTTTTCGTTTTAAGTTTGTTCTTTA |
| | | TTCTAATGATCTTATTAAGGTTCAGCTTAAGAAGGATTCTTTTCTTG |
| | | GTTATTTTTCTGGTCTTGATCGTGCTACTGGTGCTATTTCTCTTCGTG |
| | | AGCATGATCTTGAGAAGTCTAAGGGTAAGGATGGTATGCATCGTAT |
| | | TGGTGTTAAGACTGCTCTTTCTTTTCAGAAGTATCAGATTGATGAGA |
| | | TGGGTAAGGAGATTCGTCCTTGTCGTCTTAAGAAGCGTCCTCCTGTT |
| | | CGT |
| 221 | Exemplary | GCCGCCTTCAAGCCCAACCCCATCAACTACATCCTGGGCCTGGACA |
| | coding sequence | TCGGCATCGCCTCCGTGGGCTGGGCCATGGTGGAGATCGACGAGGA |
| | encoding | GGAGAACCCCATCCGGCTGATCGACCTGGGCGTGCGGGTGTTCGAG |
| | Nme3Cas9 HNH | CGGGCCGAGGTGCCCAAGACCGGCGACTCCCTGGCCATGGCCCGGC |
| | nickase | GGCTGGCCCGGTCCGTGCGGCGGCTGACCCGGCGGCGGGCCCACCG |
| | | GCTGCTGCGGGCCCGGCGGCTGCTGAAGCGGGAGGGCGTGCTGCA |
| | | GGCCGCCGACTTCGACGAGAACGGCCTGATCAAGTCCCTGCCCAAC |
| | | ACCCCCTGGCAGCTGCGGGCCGCCGCCCTGGACCGGAAGCTGACCC |
| | | CCCTGGAGTGGTCCGCCGTGCTGCTGCACCTGATCAAGCACCGGGG |
| | | CTACCTGTCCCAGCGGAAGAACGAGGGCGAGACCGCCGACAAGGA |
| | | GCTGGGCGCCCTGCTGAAGGGCGTGGCCGACAACGCCCACGCCCTG |
| | | CAGACCGGCGACTTCCGGACCCCCGCCGAGCTGGCCCTGAACAAGT |
| | | TCGAGAAGGAGTGCGGCCACATCCGGAACCAGCGGGGCGACTACT |
| | | CCCACACCTTCTCCCGGAAGGACCTGCAGGCCGAGCTGAACCTGCT |
| | | GTTCGAGAAGCAGAAGGAGTTCGGCAACCCCCACGTGTCCGGCGGC |
| | | CTGAAGGAGGGCATCGAGACCCTGCTGATGACCCAGCGGCCCGCCC |
| | | TGTCCGGCGACGCCGTGCAGAAGATGCTGGGCCACTGCACCTTCGA |
| | | GCCCGCCGAGCCCAAGGCCGCCAAGAACACCTACACCGCCGAGCG |
| | | GTTCATCTGGCTGACCAAGCTGAACAACCTGCGGATCCTGGAGCAG |
| | | GGCTCCGAGCGGCCCCTGACCGACACCGAGCGGGCCACCCTGATGG |
| | | ACGAGCCCTACCGGAAGTCCAAGCTGACCTACGCCCAGGCCCGGAA |
| | | GCTGCTGTCCCTGGAGGACACCGCCTTCTTCAAGGGCCTGCGGTAC |
| | | GGCAAGGACAACGCCGAGGCCTCCACCCTGATGGAGATGAAGGCC |
| | | TACCACACCATCTCCCGGGCCCTGGAGAAGGAGGGCCTGAAGGAC |
| | | AAGAAGTCCCCCCTGAACCTGTCCCCCGAGCTGCAGGACGAGATCG |
| | | GCACCGCCTTCTCCCTGTTCAAGACCGACGAGGACATCACCGGCCG |
| | | GCTGAAGGACCGGATCCAGCCCGAGATCCTGGAGGCCCTGCTGAAG |
| | | CACATCTCCTTCGACAAGTTCGTGCAGATCTCCCTGAAGGCCCTGCG |
| | | GCGGATCGTGCCCCTGATGGAGCAGGGCAAGCGGTACGACGAGGC |
| | | CTGCGCCGAGATCTACGGCGACCACTACGGCAAGAAGAACACCGA |
| | | GGAGAAGATCTACCTGCCCCCCATCCCCGCCGACGAGATCCGGAAC |
| | | CCCGTGGTGCTGCGGGCCCTGTCCCAGGCCCGGAAGGTGATCAACG |
| | | GCGTGGTGCGGCGGTACGGCTCCCCCGCCCGGATCCACATCGAGAC |
| | | CGCCCGGGAGGTGGGCAAGTCCTTCAAGGACCGGAAGGAGATCGA |
| | | GAAGCGGCAGGAGGAGAACCGGAAGGACCGGGAGAAGGCCGCCG |
| | | CCAAGTTCCGGGAGTACTTCCCCAACTTCGTGGGCGAGCCCAAGTC |
| | | CAAGGACATCCTGAAGCTGCGGCTGTACGAGCAGCAGCACGGCAA |
| | | GTGCCTGTACTCCGGCAAGGAGATCAACCTGGGCCGGCTGAACGAG |
| | | AAGGGCTACGTGGAGATCGACGCCGCCCTGCCCTTCTCCCGGACCT |
| | | GGGACGACTCCTTCAACAACAAGGTGCTGGTGCTGGGCTCCGAGAA |
| | | CCAGAACAAGGGCAACCAGACCCCCTACGAGTACTTCAACGGCAA |
| | | GGACAACTCCCGGGAGTGGCAGGAGTTCAAGGCCCGGGTGGAGAC |
| | | CTCCCGGTTCCCCCGGTCCAAGAAGCAGCGGATCCTGCTGCAGAAG |
| | | TTCGACGAGGACGGCTTCAAGGAGCGGAACCTGAACGACACCCGG |
| | | TACGTGAACCGGTTCCTGTGCCAGTTCGTGGCCGACCGGATGCGGC |
| | | TGACCGGCAAGGGCAAGAAGCGGGTGTTCGCCTCCAACGGCCAGA |
| | | TCACCAACCTGCTGCGGGGCTTCTGGGGCCTGCGGAAGGTGCGGGC |
| | | CGAGAACGACCGGCACCACGCCCTGGACGCCGTGGTGGTGGCCTGC |
| | | TCCACCGTGGCCATGCAGCAGAAGATCACCCGGTTCGTGCGGTACA |
| | | AGGAGATGAACGCCTTCGACGGCAAGACCATCGACAAGGAGACCG |
| | | GCGAGGTGCTGCACCAGAAGACCCACTTCCCCCAGCCCTGGGAGTT |
| | | CTTCGCCCAGGAGGTGATGATCCGGGTGTTCGGCAAGCCCGACGGC |
| | | AAGCCCGAGTTCGAGGAGGCCGACACCCCCGAGAAGCTGCGGACC |
| | | CTGCTGGCCGAGAAGCTGTCCTCCCGGCCCGAGGCCGTGCACGAGT |
| | | ACGTGACCCCCCTGTTCGTGTCCCGGGCCCCCAACCGGAAGATGTC |
| | | CGGCCAGGGCCACATGGAGACCGTGAAGTCCGCCAAGCGGCTGGA |
| | | CGAGGGCGTGTCCGTGCTGCGGGTGCCCCTGACCCAGCTGAAGCTG |
| | | AAGGACCTGGAGAAGATGGTGAACCGGGAGCGGGAGCCCAAGCTG |
| | | TACGAGGCCCTGAAGGCCCGGCTGGAGGCCCACAAGGACGACCCC |
| | | GCCAAGGCCTTCGCCGAGCCCTTCTACAAGTACGACAAGGCCGGCA |
| | | ACCGGACCCAGCAGGTGAAGGCCGTGCGGGTGGAGCAGGTGCAGA |
| | | AGACCGGCGTGTGGGTGCGGAACCACAACGGCATCGCCGACAACG |
| | | CCACCATGGTGCGGGTGGACGTGTTCGAGAAGGGCGACAAGTACTA |
| | | CCTGGTGCCCATCTACTCCTGGCAGGTGGCCAAGGGCATCCTGCCC |
| | | GACCGGGCCGTGGTGGCCTACGCCGACGAGGAGGACTGGACCGTG |
| | | ATCGACGAGTCCTTCCGGTTCAAGTTCGTGCTGTACTCCAACGACCT |
| | | GATCAAGGTGCAGCTGAAGAAGGACTCCTTCCTGGGCTACTTCTCC |
| | | GGCCTGGACCGGGCCACCGGCGCCATCTCCCTGCGGGAGCACGACC |
| | | TGGAGAAGTCCAAGGGCAAGGACGGCATGCACCGGATCGGCGTGA |
| | | AGACCGCCCTGTCCTTCCAGAAGTACCAGATCGACGAGATGGGCAA |
| | | GGAGATCCGGCCCTGCCGGCTGAAGAAGCGGCCCCCCGTGCGG |
| 222 | Exemplary | GCAGCATTCAAACCAAACCCAATCAACTACATCCTAGGACTAGACA |
| | coding sequence | TCGGAATCGCATCAGTAGGATGAGCAATGGTAGAAATCGACGAAG |
| | encoding | AAGAAAACCCAATCCGACTAATCGACCTAGGAGTACGAGTATTCGA |
| | Nme3Cas9 HNH | ACGAGCAGAAGTACCAAAAACAGGAGACTCACTAGCAATGGCACG |
| | nickase | ACGACTAGCACGATCAGTACGACGACTAACACGACGACGAGCACA |
| | | CCGACTACTACGAGCACGACGACTACTAAAACGAGAAGGAGTACT |
| | | ACAAGCAGCAGACTTCGACGAAAACGGACTAATCAAATCACTACC |
| | | AAACACACCATGACAACTACGAGCAGCAGCACTAGACCGAAAACT |
| | | AACACCACTAGAATGATCAGCAGTACTACTACACCTAATCAAACAC |
| | | CGAGGATACCTATCACAACGAAAAAACGAAGGAGAAACAGCAGAC |
| | | AAAGAACTAGGAGCACTACTAAAAGGAGTAGCAGACAACGCACAC |
| | | GCACTACAAACAGGAGACTTCCGAACACCAGCAGAACTAGCACTA |
| | | AACAAATTCGAAAAAGAATGCGGACACATCCGAAACCAACGAGGA |
| | | GACTACTCACACACATTCTCACGAAAAGACCTACAAGCAGAACTAA |
| | | ACCTACTATTCGAAAAACAAAAAGAATTCGGAAACCCACACGTATC |
| | | AGGAGGACTAAAAGAAGGAATCGAAACACTACTAATGACACAACG |
| | | ACCAGCACTATCAGGAGACGCAGTACAAAAAATGCTAGGACACTG |
| | | CACATTCGAACCAGCAGAACCAAAAGCAGCAAAAAACACATACAC |
| | | AGCAGAACGATTCATCTGACTAACAAAACTAAACAACCTACGAATC |
| | | CTAGAACAAGGATCAGAACGACCACTAACAGACACAGAACGAGCA |
| | | ACACTAATGGACGAACCATACCGAAAATCAAAACTAACATACGCA |
| | | CAAGCACGAAAACTACTATCACTAGAAGACACAGCATTCTTCAAAG |
| | | GACTACGATACGGAAAAGACAACGCAGAAGCATCAACACTAATGG |
| | | AAATGAAAGCATACCACACAATCTCACGAGCACTAGAAAAAGAAG |
| | | GACTAAAAGACAAAAAATCACCACTAAACCTATCACCAGAACTAC |
| | | AAGACGAAATCGGAACAGCATTCTCACTATTCAAAACAGACGAAG |
| | | ACATCACAGGACGACTAAAAGACCGAATCCAACCAGAAATCCTAG |
| | | AAGCACTACTAAAACACATCTCATTCGACAAATTCGTACAAATCTC |
| | | ACTAAAAGCACTACGACGAATCGTACCACTAATGGAACAAGGAAA |
| | | ACGATACGACGAAGCATGCGCAGAAATCTACGGAGACCACTACGG |
| | | AAAAAAAAACACAGAAGAAAAAATCTACCTACCACCAATCCCAGC |
| | | AGACGAAATCCGAAACCCAGTAGTACTACGAGCACTATCACAAGC |
| | | ACGAAAAGTAATCAACGGAGTAGTACGACGATACGGATCACCAGC |
| | | ACGAATCCACATCGAAACAGCACGAGAAGTAGGAAAATCATTCAA |
| | | AGACCGAAAAGAAATCGAAAAACGACAAGAAGAAAACCGAAAAG |
| | | ACCGAGAAAAAGCAGCAGCAAAATTCCGAGAATACTTCCCAAACTT |
| | | CGTAGGAGAACCAAAATCAAAAGACATCCTAAAACTACGACTATA |
| | | CGAACAACAACACGGAAAATGCCTATACTCAGGAAAAGAAATCAA |
| | | CCTAGGACGACTAAACGAAAAAGGATACGTAGAAATCGACGCAGC |
| | | ACTACCATTCTCACGAACATGAGACGACTCATTCAACAACAAAGTA |
| | | CTAGTACTAGGATCAGAAAACCAAAACAAAGGAAACCAAACACCA |
| | | TACGAATACTTCAACGGAAAAGACAACTCACGAGAATGACAAGAA |
| | | TTCAAAGCACGAGTAGAAACATCACGATTCCCACGATCAAAAAAAC |
| | | AACGAATCCTACTACAAAAATTCGACGAAGACGGATTCAAAGAAC |
| | | GAAACCTAAACGACACACGATACGTAAACCGATTCCTATGCCAATT |
| | | CGTAGCAGACCGAATGCGACTAACAGGAAAAGGAAAAAAACGAGT |
| | | ATTCGCATCAAACGGACAAATCACAAACCTACTACGAGGATTCTGA |
| | | GGACTACGAAAAGTACGAGCAGAAAACGACCGACACCACGCACTA |
| | | GACGCAGTAGTAGTAGCATGCTCAACAGTAGCAATGCAACAAAAA |
| | | ATCACACGATTCGTACGATACAAAGAAATGAACGCATTCGACGGAA |
| | | AAACAATCGACAAAGAAACAGGAGAAGTACTACACCAAAAAACAC |
| | | ACTTCCCACAACCATGAGAATTCTTCGCACAAGAAGTAATGATCCG |
| | | AGTATTCGGAAAACCAGACGGAAAACCAGAATTCGAAGAAGCAGA |
| | | CACACCAGAAAAACTACGAACACTACTAGCAGAAAAACTATCATC |
| | | ACGACCAGAAGCAGTACACGAATACGTAACACCACTATTCGTATCA |
| | | CGAGCACCAAACCGAAAAATGTCAGGACAAGGACACATGGAAACA |
| | | GTAAAATCAGCAAAACGACTAGACGAAGGAGTATCAGTACTACGA |
| | | GTACCACTAACACAACTAAAACTAAAAGACCTAGAAAAAATGGTA |
| | | AACCGAGAACGAGAACCAAAACTATACGAAGCACTAAAAGCACGA |
| | | CTAGAAGCACACAAAGACGACCCAGCAAAAGCATTCGCAGAACCA |
| | | TTCTACAAATACGACAAAGCAGGAAACCGAACACAACAAGTAAAA |
| | | GCAGTACGAGTAGAACAAGTACAAAAAACAGGAGTATGAGTACGA |
| | | AACCACAACGGAATCGCAGACAACGCAACAATGGTACGAGTAGAC |
| | | GTATTCGAAAAAGGAGACAAATACTACCTAGTACCAATCTACTCAT |
| | | GACAAGTAGCAAAAGGAATCCTACCAGACCGAGCAGTAGTAGCAT |
| | | ACGCAGACGAAGAAGACTGAACAGTAATCGACGAATCATTCCGATT |
| | | CAAATTCGTACTATACTCAAACGACCTAATCAAAGTACAACTAAAA |
| | | AAAGACTCATTCCTAGGATACTTCTCAGGACTAGACCGAGCAACAG |
| | | GAGCAATCTCACTACGAGAACACGACCTAGAAAAATCAAAAGGAA |
| | | AAGACGGAATGCACCGAATCGGAGTAAAAACAGCACTATCATTCC |
| | | AAAAATACCAAATCGACGAAATGGGAAAAGAAATCCGACCATGCC |
| | | GACTAAAAAAACGACCACCAGTACGA |
| 223 | Exemplary open | ATGGCTGCTTTTAAGCCTAATCCTATTAATTATATTCTTGGTCTTGAT |
| | reading frame for | ATTGGTATTGCTTCTGTTGGTTGGGCTATGGTTGAGATTGATGAGGA |
| | Nme3Cas9 HNH | GGAGAATCCTATTCGTCTTATTGATCTTGGTGTTCGTGTTTTTGAGC |
| | nickase | GTGCTGAGGTTCCTAAGACTGGTGATTCTCTTGCTATGGCTCGTCGT |
| | | CTTGCTCGTTCTGTTCGTCGTCTTACTCGTCGTCGTGCTCATCGTCTT |
| | | CTTCGTGCTCGTCGTCTTCTTAAGCGTGAGGGTGTTCTTCAGGCTGC |
| | | TGATTTTGATGAGAATGGTCTTATTAAGTCTCTTCCTAATACTCCTT |
| | | GGCAGCTTCGTGCTGCTGCTCTTGATCGTAAGCTTACTCCTCTTGAG |
| | | TGGTCTGCTGTTCTTCTTCATCTTATTAAGCATCGTGGTTATCTTTCT |
| | | CAGCGTAAGAATGAGGGTGAGACTGCTGATAAGGAGCTTGGTGCTC |
| | | TTCTTAAGGGTGTTGCTGATAATGCTCATGCTCTTCAGACTGGTGAT |
| | | TTTCGTACTCCTGCTGAGCTTGCTCTTAATAAGTTTGAGAAGGAGTG |
| | | TGGTCATATTCGTAATCAGCGTGGTGATTATTCTCATACTTTTTCTC |
| | | GTAAGGATCTTCAGGCTGAGCTTAATCTTCTTTTTGAGAAGCAGAA |
| | | GGAGTTTGGTAATCCTCATGTTTCTGGTGGTCTTAAGGAGGGTATTG |
| | | AGACTCTTCTTATGACTCAGCGTCCTGCTCTTTCTGGTGATGCTGTT |
| | | CAGAAGATGCTTGGTCATTGTACTTTTGAGCCTGCTGAGCCTAAGG |
| | | CTGCTAAGAATACTTATACTGCTGAGCGTTTTATTTGGCTTACTAAG |
| | | CTTAATAATCTTCGTATTCTTGAGCAGGGTTCTGAGCGTCCTCTTAC |
| | | TGATACTGAGCGTGCTACTCTTATGGATGAGCCTTATCGTAAGTCTA |
| | | AGCTTACTTATGCTCAGGCTCGTAAGCTTCTTTCTCTTGAGGATACT |
| | | GCTTTTTTTAAGGGTCTTCGTTATGGTAAGGATAATGCTGAGGCTTC |
| | | TACTCTTATGGAGATGAAGGCTTATCATACTATTTCTCGTGCTCTTG |
| | | AGAAGGAGGGTCTTAAGGATAAGAAGTCTCCTCTTAATCTTTCTCCT |
| | | GAGCTTCAGGATGAGATTGGTACTGCTTTTTCTCTTTTTAAGACTGA |
| | | TGAGGATATTACTGGTCGTCTTAAGGATCGTATTCAGCCTGAGATTC |
| | | TTGAGGCTCTTCTTAAGCATATTTCTTTTGATAAGTTTGTTCAGATTT |
| | | CTCTTAAGGCTCTTCGTCGTATTGTTCCTCTTATGGAGCAGGGTAAG |
| | | CGTTATGATGAGGCTTGTGCTGAGATTTATGGTGATCATTATGGTAA |
| | | GAAGAATACTGAGGAGAAGATTTATCTTCCTCCTATTCCTGCTGATG |
| | | AGATTCGTAATCCTGTTGTTCTTCGTGCTCTTTCTCAGGCTCGTAAG |
| | | GTTATTAATGGTGTTGTTCGTCGTTATGGTTCTCCTGCTCGTATTCAT |
| | | ATTGAGACTGCTCGTGAGGTTGGTAAGTCTTTTAAGGATCGTAAGG |
| | | AGATTGAGAAGCGTCAGGAGGAGAATCGTAAGGATCGTGAGAAGG |
| | | CTGCTGCTAAGTTTCGTGAGTATTTTCCTAATTTTGTTGGTGAGCCT |
| | | AAGTCTAAGGATATTCTTAAGCTTCGTCTTTATGAGCAGCAGCATG |
| | | GTAAGTGTCTTTATTCTGGTAAGGAGATTAATCTTGGTCGTCTTAAT |
| | | GAGAAGGGTTATGTTGAGATTGATGCTGCTCTTCCTTTTTCTCGTAC |
| | | TTGGGATGATTCTTTTAATAATAAGGTTCTTGTTCTTGGTTCTGAGA |
| | | ATCAGAATAAGGGTAATCAGACTCCTTATGAGTATTTTAATGGTAA |
| | | GGATAATTCTCGTGAGTGGCAGGAGTTTAAGGCTCGTGTTGAGACT |
| | | TCTCGTTTTCCTCGTTCTAAGAAGCAGCGTATTCTTCTTCAGAAGTT |
| | | TGATGAGGATGGTTTTAAGGAGCGTAATCTTAATGATACTCGTTAT |
| | | GTTAATCGTTTTCTTTGTCAGTTTGTTGCTGATCGTATGCGTCTTACT |
| | | GGTAAGGGTAAGAAGCGTGTTTTTGCTTCTAATGGTCAGATTACTA |
| | | ATCTTCTTCGTGGTTTTTGGGGTCTTCGTAAGGTTCGTGCTGAGAAT |
| | | GATCGTCATCATGCTCTTGATGCTGTTGTTGTTGCTTGTTCTACTGTT |
| | | GCTATGCAGCAGAAGATTACTCGTTTTGTTCGTTATAAGGAGATGA |
| | | ATGCTTTTGATGGTAAGACTATTGATAAGGAGACTGGTGAGGTTCT |
| | | TCATCAGAAGACTCATTTTCCTCAGCCTTGGGAGTTTTTTGCTCAGG |
| | | AGGTTATGATTCGTGTTTTTGGTAAGCCTGATGGTAAGCCTGAGTTT |
| | | GAGGAGGCTGATACTCCTGAGAAGCTTCGTACTCTTCTTGCTGAGA |
| | | AGCTTTCTTCTCGTCCTGAGGCTGTTCATGAGTATGTTACTCCTCTTT |
| | | TTGTTTCTCGTGCTCCTAATCGTAAGATGTCTGGTCAGGGTCATATG |
| | | GAGACTGTTAAGTCTGCTAAGCGTCTTGATGAGGGTGTTTCTGTTCT |
| | | TCGTGTTCCTCTTACTCAGCTTAAGCTTAAGGATCTTGAGAAGATGG |
| | | TTAATCGTGAGCGTGAGCCTAAGCTTTATGAGGCTCTTAAGGCTCGT |
| | | CTTGAGGCTCATAAGGATGATCCTGCTAAGGCTTTTGCTGAGCCTTT |
| | | TTATAAGTATGATAAGGCTGGTAATCGTACTCAGCAGGTTAAGGCT |
| | | GTTCGTGTTGAGCAGGTTCAGAAGACTGGTGTTTGGGTTCGTAATC |
| | | ATAATGGTATTGCTGATAATGCTACTATGGTTCGTGTTGATGTTTTT |
| | | GAGAAGGGTGATAAGTATTATCTTGTTCCTATTTATTCTTGGCAGGT |
| | | TGCTAAGGGTATTCTTCCTGATCGTGCTGTTGTTGCTTATGCTGATG |
| | | AGGAGGATTGGACTGTTATTGATGAGTCTTTTCGTTTTAAGTTTGTT |
| | | CTTTATTCTAATGATCTTATTAAGGTTCAGCTTAAGAAGGATTCTTT |
| | | TCTTGGTTATTTTTCTGGTCTTGATCGTGCTACTGGTGCTATTTCTCT |
| | | TCGTGAGCATGATCTTGAGAAGTCTAAGGGTAAGGATGGTATGCAT |
| | | CGTATTGGTGTTAAGACTGCTCTTTCTTTTCAGAAGTATCAGATTGA |
| | | TGAGATGGGTAAGGAGATTCGTCCTTGTCGTCTTAAGAAGCGTCCT |
| | | CCTGTTCGTUGA |
| 224 | Exemplary open | ATGGCCGCCTTCAAGCCCAACCCCATCAACTACATCCTGGGCCTGG |
| | reading frame for | ACATCGGCATCGCCTCCGTGGGCTGGGCCATGGTGGAGATCGACGA |
| | Nme3Cas9 HNH | GGAGGAGAACCCCATCCGGCTGATCGACCTGGGCGTGCGGGTGTTC |
| | nickase | GAGCGGGCCGAGGTGCCCAAGACCGGCGACTCCCTGGCCATGGCCC |
| | | GGCGGCTGGCCCGGTCCGTGCGGCGGCTGACCCGGCGGCGGGCCCA |
| | | CCGGCTGCTGCGGGCCCGGCGGCTGCTGAAGCGGGAGGGCGTGCTG |
| | | CAGGCCGCCGACTTCGACGAGAACGGCCTGATCAAGTCCCTGCCCA |
| | | ACACCCCCTGGCAGCTGCGGGCCGCCGCCCTGGACCGGAAGCTGAC |
| | | CCCCCTGGAGTGGTCCGCCGTGCTGCTGCACCTGATCAAGCACCGG |
| | | GGCTACCTGTCCCAGCGGAAGAACGAGGGCGAGACCGCCGACAAG |
| | | GAGCTGGGCGCCCTGCTGAAGGGCGTGGCCGACAACGCCCACGCCC |
| | | TGCAGACCGGCGACTTCCGGACCCCCGCCGAGCTGGCCCTGAACAA |
| | | GTTCGAGAAGGAGTGCGGCCACATCCGGAACCAGCGGGGCGACTA |
| | | CTCCCACACCTTCTCCCGGAAGGACCTGCAGGCCGAGCTGAACCTG |
| | | CTGTTCGAGAAGCAGAAGGAGTTCGGCAACCCCCACGTGTCCGGCG |
| | | GCCTGAAGGAGGGCATCGAGACCCTGCTGATGACCCAGCGGCCCGC |
| | | CCTGTCCGGCGACGCCGTGCAGAAGATGCTGGGCCACTGCACCTTC |
| | | GAGCCCGCCGAGCCCAAGGCCGCCAAGAACACCTACACCGCCGAG |
| | | CGGTTCATCTGGCTGACCAAGCTGAACAACCTGCGGATCCTGGAGC |
| | | AGGGCTCCGAGCGGCCCCTGACCGACACCGAGCGGGCCACCCTGAT |
| | | GGACGAGCCCTACCGGAAGTCCAAGCTGACCTACGCCCAGGCCCGG |
| | | AAGCTGCTGTCCCTGGAGGACACCGCCTTCTTCAAGGGCCTGCGGT |
| | | ACGGCAAGGACAACGCCGAGGCCTCCACCCTGATGGAGATGAAGG |
| | | CCTACCACACCATCTCCCGGGCCCTGGAGAAGGAGGGCCTGAAGGA |
| | | CAAGAAGTCCCCCCTGAACCTGTCCCCCGAGCTGCAGGACGAGATC |
| | | GGCACCGCCTTCTCCCTGTTCAAGACCGACGAGGACATCACCGGCC |
| | | GGCTGAAGGACCGGATCCAGCCCGAGATCCTGGAGGCCCTGCTGAA |
| | | GCACATCTCCTTCGACAAGTTCGTGCAGATCTCCCTGAAGGCCCTGC |
| | | GGCGGATCGTGCCCCTGATGGAGCAGGGCAAGCGGTACGACGAGG |
| | | CCTGCGCCGAGATCTACGGCGACCACTACGGCAAGAAGAACACCG |
| | | AGGAGAAGATCTACCTGCCCCCCATCCCCGCCGACGAGATCCGGAA |
| | | CCCCGTGGTGCTGCGGGCCCTGTCCCAGGCCCGGAAGGTGATCAAC |
| | | GGCGTGGTGCGGCGGTACGGCTCCCCCGCCCGGATCCACATCGAGA |
| | | CCGCCCGGGAGGTGGGCAAGTCCTTCAAGGACCGGAAGGAGATCG |
| | | AGAAGCGGCAGGAGGAGAACCGGAAGGACCGGGAGAAGGCCGCC |
| | | GCCAAGTTCCGGGAGTACTTCCCCAACTTCGTGGGCGAGCCCAAGT |
| | | CCAAGGACATCCTGAAGCTGCGGCTGTACGAGCAGCAGCACGGCA |
| | | AGTGCCTGTACTCCGGCAAGGAGATCAACCTGGGCCGGCTGAACGA |
| | | GAAGGGCTACGTGGAGATCGACGCCGCCCTGCCCTTCTCCCGGACC |
| | | TGGGACGACTCCTTCAACAACAAGGTGCTGGTGCTGGGCTCCGAGA |
| | | ACCAGAACAAGGGCAACCAGACCCCCTACGAGTACTTCAACGGCA |
| | | AGGACAACTCCCGGGAGTGGCAGGAGTTCAAGGCCCGGGTGGAGA |
| | | CCTCCCGGTTCCCCCGGTCCAAGAAGCAGCGGATCCTGCTGCAGAA |
| | | GTTCGACGAGGACGGCTTCAAGGAGCGGAACCTGAACGACACCCG |
| | | GTACGTGAACCGGTTCCTGTGCCAGTTCGTGGCCGACCGGATGCGG |
| | | CTGACCGGCAAGGGCAAGAAGCGGGTGTTCGCCTCCAACGGCCAG |
| | | ATCACCAACCTGCTGCGGGGCTTCTGGGGCCTGCGGAAGGTGCGGG |
| | | CCGAGAACGACCGGCACCACGCCCTGGACGCCGTGGTGGTGGCCTG |
| | | CTCCACCGTGGCCATGCAGCAGAAGATCACCCGGTTCGTGCGGTAC |
| | | AAGGAGATGAACGCCTTCGACGGCAAGACCATCGACAAGGAGACC |
| | | GGCGAGGTGCTGCACCAGAAGACCCACTTCCCCCAGCCCTGGGAGT |
| | | TCTTCGCCCAGGAGGTGATGATCCGGGTGTTCGGCAAGCCCGACGG |
| | | CAAGCCCGAGTTCGAGGAGGCCGACACCCCCGAGAAGCTGCGGAC |
| | | CCTGCTGGCCGAGAAGCTGTCCTCCCGGCCCGAGGCCGTGCACGAG |
| | | TACGTGACCCCCCTGTTCGTGTCCCGGGCCCCCAACCGGAAGATGT |
| | | CCGGCCAGGGCCACATGGAGACCGTGAAGTCCGCCAAGCGGCTGG |
| | | ACGAGGGCGTGTCCGTGCTGCGGGTGCCCCTGACCCAGCTGAAGCT |
| | | GAAGGACCTGGAGAAGATGGTGAACCGGGAGCGGGAGCCCAAGCT |
| | | GTACGAGGCCCTGAAGGCCCGGCTGGAGGCCCACAAGGACGACCC |
| | | CGCCAAGGCCTTCGCCGAGCCCTTCTACAAGTACGACAAGGCCGGC |
| | | AACCGGACCCAGCAGGTGAAGGCCGTGCGGGTGGAGCAGGTGCAG |
| | | AAGACCGGCGTGTGGGTGCGGAACCACAACGGCATCGCCGACAAC |
| | | GCCACCATGGTGCGGGTGGACGTGTTCGAGAAGGGCGACAAGTACT |
| | | ACCTGGTGCCCATCTACTCCTGGCAGGTGGCCAAGGGCATCCTGCC |
| | | CGACCGGGCCGTGGTGGCCTACGCCGACGAGGAGGACTGGACCGT |
| | | GATCGACGAGTCCTTCCGGTTCAAGTTCGTGCTGTACTCCAACGACC |
| | | TGATCAAGGTGCAGCTGAAGAAGGACTCCTTCCTGGGCTACTTCTC |
| | | CGGCCTGGACCGGGCCACCGGCGCCATCTCCCTGCGGGAGCACGAC |
| | | CTGGAGAAGTCCAAGGGCAAGGACGGCATGCACCGGATCGGCGTG |
| | | AAGACCGCCCTGTCCTTCCAGAAGTACCAGATCGACGAGATGGGCA |
| | | AGGAGATCCGGCCCTGCCGGCTGAAGAAGCGGCCCCCCGTGCGGU |
| | | GA |
| 225 | Exemplary open | ATGGCAGCATTCAAACCAAACCCAATCAACTACATCCTAGGACTAG |
| | reading frame for | ACATCGGAATCGCATCAGTAGGATGAGCAATGGTAGAAATCGACG |
| | Nme3Cas9 HNH | AAGAAGAAAACCCAATCCGACTAATCGACCTAGGAGTACGAGTATT |
| | nickase | CGAACGAGCAGAAGTACCAAAAACAGGAGACTCACTAGCAATGGC |
| | | ACGACGACTAGCACGATCAGTACGACGACTAACACGACGACGAGC |
| | | ACACCGACTACTACGAGCACGACGACTACTAAAACGAGAAGGAGT |
| | | ACTACAAGCAGCAGACTTCGACGAAAACGGACTAATCAAATCACTA |
| | | CCAAACACACCATGACAACTACGAGCAGCAGCACTAGACCGAAAA |
| | | CTAACACCACTAGAATGATCAGCAGTACTACTACACCTAATCAAAC |
| | | ACCGAGGATACCTATCACAACGAAAAAACGAAGGAGAAACAGCAG |
| | | ACAAAGAACTAGGAGCACTACTAAAAGGAGTAGCAGACAACGCAC |
| | | ACGCACTACAAACAGGAGACTTCCGAACACCAGCAGAACTAGCAC |
| | | TAAACAAATTCGAAAAAGAATGCGGACACATCCGAAACCAACGAG |
| | | GAGACTACTCACACACATTCTCACGAAAAGACCTACAAGCAGAACT |
| | | AAACCTACTATTCGAAAAACAAAAAGAATTCGGAAACCCACACGT |
| | | ATCAGGAGGACTAAAAGAAGGAATCGAAACACTACTAATGACACA |
| | | ACGACCAGCACTATCAGGAGACGCAGTACAAAAAATGCTAGGACA |
| | | CTGCACATTCGAACCAGCAGAACCAAAAGCAGCAAAAAACACATA |
| | | CACAGCAGAACGATTCATCTGACTAACAAAACTAAACAACCTACGA |
| | | ATCCTAGAACAAGGATCAGAACGACCACTAACAGACACAGAACGA |
| | | GCAACACTAATGGACGAACCATACCGAAAATCAAAACTAACATAC |
| | | GCACAAGCACGAAAACTACTATCACTAGAAGACACAGCATTCTTCA |
| | | AAGGACTACGATACGGAAAAGACAACGCAGAAGCATCAACACTAA |
| | | TGGAAATGAAAGCATACCACACAATCTCACGAGCACTAGAAAAAG |
| | | AAGGACTAAAAGACAAAAAATCACCACTAAACCTATCACCAGAAC |
| | | TACAAGACGAAATCGGAACAGCATTCTCACTATTCAAAACAGACGA |
| | | AGACATCACAGGACGACTAAAAGACCGAATCCAACCAGAAATCCT |
| | | AGAAGCACTACTAAAACACATCTCATTCGACAAATTCGTACAAATC |
| | | TCACTAAAAGCACTACGACGAATCGTACCACTAATGGAACAAGGA |
| | | AAACGATACGACGAAGCATGCGCAGAAATCTACGGAGACCACTAC |
| | | GGAAAAAAAAACACAGAAGAAAAAATCTACCTACCACCAATCCCA |
| | | GCAGACGAAATCCGAAACCCAGTAGTACTACGAGCACTATCACAA |
| | | GCACGAAAAGTAATCAACGGAGTAGTACGACGATACGGATCACCA |
| | | GCACGAATCCACATCGAAACAGCACGAGAAGTAGGAAAATCATTC |
| | | AAAGACCGAAAAGAAATCGAAAAACGACAAGAAGAAAACCGAAA |
| | | AGACCGAGAAAAAGCAGCAGCAAAATTCCGAGAATACTTCCCAAA |
| | | CTTCGTAGGAGAACCAAAATCAAAAGACATCCTAAAACTACGACTA |
| | | TACGAACAACAACACGGAAAATGCCTATACTCAGGAAAAGAAATC |
| | | AACCTAGGACGACTAAACGAAAAAGGATACGTAGAAATCGACGCA |
| | | GCACTACCATTCTCACGAACATGAGACGACTCATTCAACAACAAAG |
| | | TACTAGTACTAGGATCAGAAAACCAAAACAAAGGAAACCAAACAC |
| | | CATACGAATACTTCAACGGAAAAGACAACTCACGAGAATGACAAG |
| | | AATTCAAAGCACGAGTAGAAACATCACGATTCCCACGATCAAAAA |
| | | AACAACGAATCCTACTACAAAAATTCGACGAAGACGGATTCAAAG |
| | | AACGAAACCTAAACGACACACGATACGTAAACCGATTCCTATGCCA |
| | | ATTCGTAGCAGACCGAATGCGACTAACAGGAAAAGGAAAAAAACG |
| | | AGTATTCGCATCAAACGGACAAATCACAAACCTACTACGAGGATTC |
| | | TGAGGACTACGAAAAGTACGAGCAGAAAACGACCGACACCACGCA |
| | | CTAGACGCAGTAGTAGTAGCATGCTCAACAGTAGCAATGCAACAAA |
| | | AAATCACACGATTCGTACGATACAAAGAAATGAACGCATTCGACGG |
| | | AAAAACAATCGACAAAGAAACAGGAGAAGTACTACACCAAAAAAC |
| | | ACACTTCCCACAACCATGAGAATTCTTCGCACAAGAAGTAATGATC |
| | | CGAGTATTCGGAAAACCAGACGGAAAACCAGAATTCGAAGAAGCA |
| | | GACACACCAGAAAAACTACGAACACTACTAGCAGAAAAACTATCA |
| | | TCACGACCAGAAGCAGTACACGAATACGTAACACCACTATTCGTAT |
| | | CACGAGCACCAAACCGAAAAATGTCAGGACAAGGACACATGGAAA |
| | | CAGTAAAATCAGCAAAACGACTAGACGAAGGAGTATCAGTACTAC |
| | | GAGTACCACTAACACAACTAAAACTAAAAGACCTAGAAAAAATGG |
| | | TAAACCGAGAACGAGAACCAAAACTATACGAAGCACTAAAAGCAC |
| | | GACTAGAAGCACACAAAGACGACCCAGCAAAAGCATTCGCAGAAC |
| | | CATTCTACAAATACGACAAAGCAGGAAACCGAACACAACAAGTAA |
| | | AAGCAGTACGAGTAGAACAAGTACAAAAAACAGGAGTATGAGTAC |
| | | GAAACCACAACGGAATCGCAGACAACGCAACAATGGTACGAGTAG |
| | | ACGTATTCGAAAAAGGAGACAAATACTACCTAGTACCAATCTACTC |
| | | ATGACAAGTAGCAAAAGGAATCCTACCAGACCGAGCAGTAGTAGC |
| | | ATACGCAGACGAAGAAGACTGAACAGTAATCGACGAATCATTCCG |
| | | ATTCAAATTCGTACTATACTCAAACGACCTAATCAAAGTACAACTA |
| | | AAAAAAGACTCATTCCTAGGATACTTCTCAGGACTAGACCGAGCAA |
| | | CAGGAGCAATCTCACTACGAGAACACGACCTAGAAAAATCAAAAG |
| | | GAAAAGACGGAATGCACCGAATCGGAGTAAAAACAGCACTATCAT |
| | | TCCAAAAATACCAAATCGACGAAATGGGAAAAGAAATCCGACCAT |
| | | GCCGACTAAAAAAACGACCACCAGTACGAUAA |
| 226 | Exemplary | GUUUUAGAGCUAGAAAUAGCAAGUUAAAAUAAGGCUAGUCCGUU |
| | SpyCas9 sgRNA- | AUCAACUUGAAAAAGUGGCACCGAGUCGGUGC |
| | 1 | |
| 227 | Exemplary | GUUUUAGAGCUAGAAAUAGCAAGUUAAAAUAAGGCUAGUCCGUU |
| | nucleotide | AUCAACUUGAAAAAGUGGCACCGAGUCGGUGCUUUU |
| | sequence | |
| | following 3′ end | |
| | of guide sequence | |
| 228 | Exemplary | mN*mN*mN*NNNNNNNNNNNNNNNNNGUUUUAGAmGmCmUmAmG |
| | modified | mAmAmAmUmAmGmCAAGUUAAAAUAAGGCUAGUCCGUUAUCAm |
| | SpyCas9 motif | AmCmUmUmGmAmAmAmAmAmGmUmGmGmCmAmCmCmGmAmGm |
| | | UmCmGmGmUmGmCmU*mU*mU*mU |
| 229 | Exemplary | (mN*3N17GUUUUAGAmGmCmUmAmGmAmAmAmUmAmGmCAAGU |
| | modified | UAAAAUAAGGCUAGUCCGUUAUCAmAmCmUmUmGmAmA |
| | SpyCas9 | mAmAmAmGmUmGmGmCmAmCmCmGmAmGmUmCmGmGmUmGmC |
| | conserved portion | |
| | motif | |
| 230 | Exemplary | (mN*3N17GUUUUAGAmGmCmUmAmGmAmAmAmUmAmGmCAAGU |
| | modified | UAAAAUAAGGCUAGUCCGUUAUCAmAmCmUmUmGmAmA |
| | SpyCas9 | mAmAmAmGmUmGmGmCmAmCmCmGmAmGmUmCmGmGmUmGmC |
| | conserved portion | mU |
| | motif | |
| 231 | Exemplary | (mN*3N17GUUUUAGAmGmCmUmAmGmAmAmAmUmAmGmCAAGU |
| | modified | UAAAAUAAGGCUAGUCCGUUAUCAACUUGGCACCGAGUCGG*mU* |
| | SpyCas9 | mG*mC |
| | conserved portion | |
| | motif | |
| 232 | Exemplary | (mN*3N17GUUUUAGAmGmCmUmAmGmAmAmAmUmAmGmCAAGU |
| | modified | UAAAAUAAGGCUAGUCCGUUAUCAAAAUGGCACCGAGUC |
| | SpyCas9 | GG*mU*mG*mC |
| | conserved portion | |
| | motif | |
| 233 | Exemplary | (mN*3N17GUUUUAGAmGmCmUmAmGmAmAmAmUmAmGmCAAGU |
| | modified | UAAAAUAAGGCUAGUCCGUUAUCAmAmAmAmUmGmGmC |
| | SpyCas9 | mAmCmCmGmAmGmUmCmGmG*mU*mG*mC |
| | conserved portion | |
| | motif | |
| 234 | Exemplary | (mN*3N17GUUUUAGAmGmCmUmAmGmAmAmAmUmAmGmCAAGU |
| | modified | UAAAAUAAGGCUAGUCCGUUAUCACGAAAGGGCACCGAGUCGG* |
| | SpyCas9 | mU*mG*mC |
| | conserved portion | |
| | motif | |
| 235 | Exemplary | (mN*3N17GUUUUAGAmGmCmUmAmGmAmAmAmUmAmGmCAAGU |
| | modified | UAAAAUAAGGCUAGUCCGUUAUCAmCmGmAmAmAmGmG |
| | SpyCas9 | mGmCmAmCmCmGmAmGmUmCmGmG*mU*mG*mC |
| | conserved portion | |
| | motif | |
| 236 | Exemplary | (mN*3N17GUUUUAGAmGmCmUmAmGmAmAmAmUmAmGmCAAGU |
| | modified | UAAAAUAAGGCUAGUCCGUUAUCACGAAAGGGCACCG |
| | SpyCas9 | AGUCGGU*mG*mC*mU |
| | conserved portion | |
| | motif | |
| 237 | Exemplary | (mN*3N17GUUUUAGAmGmCmUmAmGmAmAmAmUmAmGmCAAGU |
| | modified | UAAAAUAAGGCUAGUCCGUUAUCACGAAAGGGCACCGAGUCGGm |
| | SpyCas9 | UmGmC*mU |
| | conserved portion | |
| | motif | |
| 238 | Exemplary | (mN*3N17GUUUfUAGmAmGmCmUmAmGmAmAmAmUmAmGmCmAm |
| | modified | AGUfUmAfAmAfAmUAmAmGmGmCmUmAGUmCmCGUfUAmUmCAm |
| | SpyCas9 | CmGmAmAmAmGmGmGmCmAmCmCmGmAmGmUmCmGmGmU*mG* |
| | conserved portion | mC*mU |
| | motif | |
| 239 | Exemplary | (mN*3N17GUUUUAGAmGmCmUmAmGmAmAmAmUmAmGmCAAGU |
| | modified | UAAAAUAAGGCUAGUCCGUUAUCACGAAAGGGCACCGAGUCGGm |
| | SpyCas9 | U*mG*mC*mU |
| | conserved portion | |
| | motif | |
| 240 | Exemplary | (mN*3N17GUUUUAGAmGmCmUmAmGmAmAmAmUmAmGmCAAGU |
| | modified | UAAAAUAAGGCUAGUCCGUUAUCAmAmCmUmUmGmAmAmAmAm |
| | SpyCas9 | AmGmUmGmGmCmAmCmCmGmAmGmUmCmGmGmUmGmC |
| | conserved portion | |
| | motif | |
| 241 | Exemplary | (mN*3N17GUUUUAGAmGmCmUmAmGmAmAmAmUmAmGmCAAGU |
| | modified | UAAAAUAAGGCUAGUCCGUUAUCAmAmCmUmUmGmAmAmAmAm |
| | SpyCas9 | AmGmUmGmGmCmAmCmCmGmAmGmUmCmGmGmUmGmCmU |
| | conserved portion | |
| | motif | |
| 242 | Exemplary | (mN*3N17GUUUUAGAmGmCmUmAmGmAmAmAmUmAmGmCAAGU |
| | modified | UAAAAUAAGGCUAGUCCGUUAUCAACUUGGCACCGAGUCGG*mU* |
| | SpyCas9 | mG*mC |
| | conserved portion | |
| | motif | |
| 243 | Exemplary | GUUGUAGCUCCCUUUCUCAUUUCGGAAACGAAAUGAGAACCGUU |
| | NmeCas9 | GCUACAAUAAGGCCGUCUGAAAAGAUGUGCCGCAACGCUCUGCCC |
| | sgRNA-1 | CUUAAAGCUUCUGCUUUAAGGGGCAUCGUUUA |
| 244 | Exemplary | GUUGUAGCUCCCUGAAACCGUUGCUACAAUAAGGCCGUCGAAAG |
| | unmodified | AUGUGCCGCAACGCUCUGCCUUCUGGCAUCGUU |
| | conserved portion | |
| | nucleotide | |
| | sequence | |
| 245 | Exemplary | GUUGUAGCUCCCUGGAAACCCGUUGCUACAAUAAGGCCGUCGAA |
| | unmodified | AGAUGUGCCGCAACGCUCUGCCUUCUGGCAUCGUUUAUU |
| | conserved portion | |
| | nucleotide | |
| | sequence | |
| 246 | Exemplary | GUUGmUmAmGmCUCCCmUmGmAmAmAmCmCGUUmGmCUAmCAA |
| | modified | U*AAGmGmCCmGmUmCmGmAmAmAmGmAmUGUGCmCGCmAmAm |
| | conserved portion | CmGCUCUmGmCCmUmUmCmUGmGCmAmUC*mG*mU*mU |
| | motif | |
| 247 | Exemplary | GUUGmUmAmGmCUCCCmUmGmAmAmAmCmCGUUmGmCUAmCAA |
| | modified | U*AAGmGmCCmGmUmCmGmAmAmAmGmAmUGUGCmCGmCAAmC |
| | conserved portion | GCUCUmGmCCmUmUmCmUGGCAUCG*mU*mU |
| | motif | |
| 248 | Exemplary | mN*mNNNNNNNNmNNNmNNNNNNNNNNNN |
| | modified | mGUUGmUmAmGmCUCCCmUmGmAmAmAmCmCGUUmGmCUAmCA |
| | conserved portion | AU*AAGmGmCCmGmUmCmGmAmAmAmGmAmUGUGCmCGCmAmA |
| | motif | mCmGCUCUmGmCCmUmUmCmUGmGCmAmUC*mG*mU*mU |
| 249 | Exemplary | (N)20- |
| | modified | 25GUUGmUmAmGmCUCCCmUmGmAmAmAmCmCGUUmGmCUAmCA |
| | conserved portion | AU*AAGmGmCCmGmUmCmGm |
| | motif | AmAmAmGmAmUGUGCmCGCmAmAmCmGCUCUmGmCCmUmUmCm |
| | | UGmGCmAmUC*mG*mU*mU |
| 250 | Exemplary | mN*mN*mN*mNmNNNmNmNNmNNmNNNNNmNNNNmNNNmGUUG |
| | modified | mUmAmGmCUCCCmUmGmAmAmAmCmCGUUmGmCUAmCAAU*AA |
| | conserved portion | GmGmCCmGmUmCmGmAmAmAmGmAmUGUGCmCGmCAAmCGCUC |
| | motif | UmGmCCmUmUmCmUGGCAUCG*mU*mU |
| 251 | G000562 | CCAAUAUCAGGAGACUAGGA |
| 252 | G013515 | CCAUCGUAAGCAAACCUUAG |
| 253 | G013519 | GCAAGGAGAGAGAUGGCUCC |
| 254 | G013520 | GAGAGAUGGCUCCAGGAAAU |
| 255 | G013523 | GGUGACACACCCCCAUUUCC |
| 256 | G013533 | AGACCCAAUAUCAGGAGACU |
| 257 | G013543 | UGUCCCUAGUGGCCCCACUG |
| 258 | G013559 | CCGGCCCUGGGAAUAUAAGG |
| 259 | G013562 | AAUAUAAGGUGGUCCCAGCU |
| 260 | G013563 | AUAUAAGGUGGUCCCAGCUC |
| 261 | G013564 | UAUAAGGUGGUCCCAGCUCG |
| 262 | G013565 | GGAUCCUGUGUCCCCGAGCU |
| 263 | G013582 | CCUGUCAUGGCAUCUUCCAG |
| 264 | G013584 | CCCUGGAAGAUGCCAUGACA |
| 265 | G000562 | CCAAUAUCAGGAGACUAGGAGUUUUAGAGCUAGAAAUAGCAAGU |
| | (exemplary full | UAAAAUAAGGCUAGUCCGUUAUCAACUUGAAAAAGUGGCACCGA |
| | sequence) | GUCGGUGCUUUU |
| 266 | G013515 | CCAUCGUAAGCAAACCUUAGGUUUUAGAGCUAGAAAUAGCAAGU |
| | (exemplary full | UAAAAUAAGGCUAGUCCGUUAUCAACUUGAAAAAGUGGCACCGA |
| | sequence) | GUCGGUGCUUUU |
| 267 | G013519 | GCAAGGAGAGAGAUGGCUCCGUUUUAGAGCUAGAAAUAGCAAGU |
| | (exemplary full | UAAAAUAAGGCUAGUCCGUUAUCAACUUGAAAAAGUGGCACCGA |
| | sequence) | GUCGGUGCUUUU |
| 268 | G013520 | GAGAGAUGGCUCCAGGAAAUGUUUUAGAGCUAGAAAUAGCAAGU |
| | (exemplary full | UAAAAUAAGGCUAGUCCGUUAUCAACUUGAAAAAGUGGCACCGA |
| | sequence) | GUCGGUGCUUUU |
| 269 | G013523 | GGUGACACACCCCCAUUUCCGUUUUAGAGCUAGAAAUAGCAAGU |
| | (exemplary full | UAAAAUAAGGCUAGUCCGUUAUCAACUUGAAAAAGUGGCACCGA |
| | sequence) | GUCGGUGCUUUU |
| 270 | G013533 | AGACCCAAUAUCAGGAGACUGUUUUAGAGCUAGAAAUAGCAAGU |
| | (exemplary full | UAAAAUAAGGCUAGUCCGUUAUCAACUUGAAAAAGUGGCACCGA |
| | sequence) | GUCGGUGCUUUU |
| 271 | G013543 | UGUCCCUAGUGGCCCCACUGGUUUUAGAGCUAGAAAUAGCAAGU |
| | (exemplary full | UAAAAUAAGGCUAGUCCGUUAUCAACUUGAAAAAGUGGCACCGA |
| | sequence) | GUCGGUGCUUUU |
| 272 | G013559 | CCGGCCCUGGGAAUAUAAGGGUUUUAGAGCUAGAAAUAGCAAGU |
| | (exemplary full | UAAAAUAAGGCUAGUCCGUUAUCAACUUGAAAAAGUGGCACCGA |
| | sequence) | GUCGGUGCUUUU |
| 273 | G013562 | AAUAUAAGGUGGUCCCAGCUGUUUUAGAGCUAGAAAUAGCAAGU |
| | (exemplary full | UAAAAUAAGGCUAGUCCGUUAUCAACUUGAAAAAGUGGCACCGA |
| | sequence) | GUCGGUGCUUUU |
| 274 | G013563 | AUAUAAGGUGGUCCCAGCUCGUUUUAGAGCUAGAAAUAGCAAGU |
| | (exemplary full | UAAAAUAAGGCUAGUCCGUUAUCAACUUGAAAAAGUGGCACCGA |
| | sequence) | GUCGGUGCUUUU |
| 275 | G013564 | UAUAAGGUGGUCCCAGCUCGGUUUUAGAGCUAGAAAUAGCAAGU |
| | (exemplary full | UAAAAUAAGGCUAGUCCGUUAUCAACUUGAAAAAGUGGCACCGA |
| | sequence) | GUCGGUGCUUUU |
| 276 | G013565 | GGAUCCUGUGUCCCCGAGCUGUUUUAGAGCUAGAAAUAGCAAGU |
| | (exemplary full | UAAAAUAAGGCUAGUCCGUUAUCAACUUGAAAAAGUGGCACCGA |
| | sequence) | GUCGGUGCUUUU |
| 277 | G013582 | CCUGUCAUGGCAUCUUCCAGGUUUUAGAGCUAGAAAUAGCAAGU |
| | (exemplary full | UAAAAUAAGGCUAGUCCGUUAUCAACUUGAAAAAGUGGCACCGA |
| | sequence) | GUCGGUGCUUUU |
| 278 | G013584 | CCCUGGAAGAUGCCAUGACAGUUUUAGAGCUAGAAAUAGCAAGU |
| | (exemplary full | UAAAAUAAGGCUAGUCCGUUAUCAACUUGAAAAAGUGGCACCGA |
| | sequence) | GUCGGUGCUUUU |
| 279 | G000562 | mC*mC*mA*AUAUCAGGAGACUAGGAGUUUUAGAmGmCmUmAmG |
| | (exemplary mod | mAmAmAmUmAmGmCAAGUUAAAAUAAGGCUAGUCCGUUAUCAm |
| | sequence) | AmCmUmUmGmAmAmAmAmAmGmUmGmGmCmAmCmCmGmAmGm |
| | | UmCmGmGmUmGmCmU*mU*mU*mU |
| 280 | G013515 | mC*mC*mA*UCGUAAGCAAACCUUAGGUUUUAGAmGmCmUmAmG |
| | (exemplary mod | mAmAmAmUmAmGmCAAGUUAAAAUAAGGCUAGUCCGUUAUCAm |
| | sequence) | AmCmUmUmGmAmAmAmAmAmGmUmGmGmCmAmCmCmGmAmGm |
| | | UmCmGmGmUmGmCmU*mU*mU*mU |
| 281 | G013519 | mG*mC*mA*AGGAGAGAGAUGGCUCCGUUUUAGAmGmCmUmAmG |
| | (exemplary mod | mAmAmAmUmAmGmCAAGUUAAAAUAAGGCUAGUCCGUUAUCAm |
| | sequence) | AmCmUmUmGmAmAmAmAmAmGmUmGmGmCmAmCmCmGmAmGm |
| | | UmCmGmGmUmGmCmU*mU*mU*mU |
| 282 | G013520 | mG*mA*mG*AGAUGGCUCCAGGAAAUGUUUUAGAmGmCmUmAmG |
| | (exemplary mod | mAmAmAmUmAmGmCAAGUUAAAAUAAGGCUAGUCCGUUAUCAm |
| | sequence) | AmCmUmUmGmAmAmAmAmAmGmUmGmGmCmAmCmCmGmAmGm |
| | | UmCmGmGmUmGmCmU*mU*mU*mU |
| 283 | G013523 | mG*mG*mU*GACACACCCCCAUUUCCGUUUUAGAmGmCmUmAmGm |
| | (exemplary mod | AmAmAmUmAmGmCAAGUUAAAAUAAGGCUAGUCCGUUAUCAmA |
| | sequence) | mCmUmUmGmAmAmAmAmAmGmUmGmGmCmAmCmCmGmAmGmU |
| | | mCmGmGmUmGmCmU*mU*mU*mU |
| 284 | G013533 | mA*mG*mA*CCCAAUAUCAGGAGACUGUUUUAGAmGmCmUmAmG |
| | (exemplary mod | mAmAmAmUmAmGmCAAGUUAAAAUAAGGCUAGUCCGUUAUCAm |
| | sequence) | AmCmUmUmGmAmAmAmAmAmGmUmGmGmCmAmCmCmGmAmGm |
| | | UmCmGmGmUmGmCmU*mU*mU*mU |
| 285 | G013543 | mU*mG*mU*CCCUAGUGGCCCCACUGGUUUUAGAmGmCmUmAmG |
| | (exemplary mod | mAmAmAmUmAmGmCAAGUUAAAAUAAGGCUAGUCCGUUAUCAm |
| | sequence) | AmCmUmUmGmAmAmAmAmAmGmUmGmGmCmAmCmCmGmAmGm |
| | | UmCmGmGmUmGmCmU*mU*mU*mU |
| 286 | G013559 | mC*mC*mG*GCCCUGGGAAUAUAAGGGUUUUAGAmGmCmUmAmG |
| | (exemplary mod | mAmAmAmUmAmGmCAAGUUAAAAUAAGGCUAGUCCGUUAUCAm |
| | sequence) | AmCmUmUmGmAmAmAmAmAmGmUmGmGmCmAmCmCmGmAmGm |
| | | UmCmGmGmUmGmCmU*mU*mU*mU |
| 287 | G013562 | mA*mA*mU*AUAAGGUGGUCCCAGCUGUUUUAGAmGmCmUmAmG |
| | (exemplary mod | mAmAmAmUmAmGmCAAGUUAAAAUAAGGCUAGUCCGUUAUCAm |
| | sequence) | AmCmUmUmGmAmAmAmAmAmGmUmGmGmCmAmCmCmGmAmGm |
| | | UmCmGmGmUmGmCmU*mU*mU*mU |
| 288 | G013563 | mA*mU*mA*UAAGGUGGUCCCAGCUCGUUUUAGAmGmCmUmAmG |
| | (exemplary mod | mAmAmAmUmAmGmCAAGUUAAAAUAAGGCUAGUCCGUUAUCAm |
| | sequence) | AmCmUmUmGmAmAmAmAmAmGmUmGmGmCmAmCmCmGmAmGm |
| | | UmCmGmGmUmGmCmU*mU*mU*mU |
| 289 | G013564 | mU*mA*mU*AAGGUGGUCCCAGCUCGGUUUUAGAmGmCmUmAmG |
| | (exemplary mod | mAmAmAmUmAmGmCAAGUUAAAAUAAGGCUAGUCCGUUAUCAm |
| | sequence) | AmCmUmUmGmAmAmAmAmAmGmUmGmGmCmAmCmCmGmAmGm |
| | | UmCmGmGmUmGmCmU*mU*mU*mU |
| 290 | G013565 | mG*mG*mA*UCCUGUGUCCCCGAGCUGUUUUAGAmGmCmUmAmG |
| | (exemplary mod | mAmAmAmUmAmGmCAAGUUAAAAUAAGGCUAGUCCGUUAUCAm |
| | sequence) | AmCmUmUmGmAmAmAmAmAmGmUmGmGmCmAmCmCmGmAmGm |
| | | UmCmGmGmUmGmCmU*mU*mU*mU |
| 291 | G013582 | mC*mC*mU*GUCAUGGCAUCUUCCAGGUUUUAGAmGmCmUmAmG |
| | (exemplary mod | mAmAmAmUmAmGmCAAGUUAAAAUAAGGCUAGUCCGUUAUCAm |
| | sequence) | AmCmUmUmGmAmAmAmAmAmGmUmGmGmCmAmCmCmGmAmGm |
| | | UmCmGmGmUmGmCmU*mU*mU*mU |
| 292 | G013584 | mC*mC*mC*UGGAAGAUGCCAUGACAGUUUUAGAmGmCmUmAmG |
| | (exemplary mod | mAmAmAmUmAmGmCAAGUUAAAAUAAGGCUAGUCCGUUAUCAm |
| | sequence) | AmCmUmUmGmAmAmAmAmAmGmUmGmGmCmAmCmCmGmAmGm |
| | | UmCmGmGmUmGmCmU*mU*mU*mU |
| 293 | Open reading | AUGGACAAGAAGUACAGCAUCGGACUGGACAUCGGAACAAACAG |
| | frame for Cas9 | CGUCGGAUGGGCAGUCAUCACAGACGAAUACAAGGUCCCGAGCA |
| | | AGAAGUUCAAGGUCCUGGGAAACACAGACAGACACAGCAUCAAG |
| | | AAGAACCUGAUCGGAGCACUGCUGUUCGACAGCGGAGAAACAGC |
| | | AGAAGCAACAAGACUGAAGAGAACAGCAAGAAGAAGAUACACAA |
| | | GAAGAAAGAACAGAAUCUGCUACCUGCAGGAAAUCUUCAGCAAC |
| | | GAAAUGGCAAAGGUCGACGACAGCUUCUUCCACAGACUGGAAGA |
| | | AAGCUUCCUGGUCGAAGAAGACAAGAAGCACGAAAGACACCCGA |
| | | UCUUCGGAAACAUCGUCGACGAAGUCGCAUACCACGAAAAGUACC |
| | | CGACAAUCUACCACCUGAGAAAGAAGCUGGUCGACAGCACAGACA |
| | | AGGCAGACCUGAGACUGAUCUACCUGGCACUGGCACACAUGAUCA |
| | | AGUUCAGAGGACACUUCCUGAUCGAAGGAGACCUGAACCCGGAC |
| | | AACAGCGACGUCGACAAGCUGUUCAUCCAGCUGGUCCAGACAUAC |
| | | AACCAGCUGUUCGAAGAAAACCCGAUCAACGCAAGCGGAGUCGAC |
| | | GCAAAGGCAAUCCUGAGCGCAAGACUGAGCAAGAGCAGAAGACU |
| | | GGAAAACCUGAUCGCACAGCUGCCGGGAGAAAAGAAGAACGGAC |
| | | UGUUCGGAAACCUGAUCGCACUGAGCCUGGGACUGACACCGAACU |
| | | UCAAGAGCAACUUCGACCUGGCAGAAGACGCAAAGCUGCAGCUG |
| | | AGCAAGGACACAUACGACGACGACCUGGACAACCUGCUGGCACAG |
| | | AUCGGAGACCAGUACGCAGACCUGUUCCUGGCAGCAAAGAACCUG |
| | | AGCGACGCAAUCCUGCUGAGCGACAUCCUGAGAGUCAACACAGAA |
| | | AUCACAAAGGCACCGCUGAGCGCAAGCAUGAUCAAGAGAUACGA |
| | | CGAACACCACCAGGACCUGACACUGCUGAAGGCACUGGUCAGACA |
| | | GCAGCUGCCGGAAAAGUACAAGGAAAUCUUCUUCGACCAGAGCA |
| | | AGAACGGAUACGCAGGAUACAUCGACGGAGGAGCAAGCCAGGAA |
| | | GAAUUCUACAAGUUCAUCAAGCCGAUCCUGGAAAAGAUGGACGG |
| | | AACAGAAGAACUGCUGGUCAAGCUGAACAGAGAAGACCUGCUGA |
| | | GAAAGCAGAGAACAUUCGACAACGGAAGCAUCCCGCACCAGAUCC |
| | | ACCUGGGAGAACUGCACGCAAUCCUGAGAAGACAGGAAGACUUC |
| | | UACCCGUUCCUGAAGGACAACAGAGAAAAGAUCGAAAAGAUCCU |
| | | GACAUUCAGAAUCCCGUACUACGUCGGACCGCUGGCAAGAGGAA |
| | | ACAGCAGAUUCGCAUGGAUGACAAGAAAGAGCGAAGAAACAAUC |
| | | ACACCGUGGAACUUCGAAGAAGUCGUCGACAAGGGAGCAAGCGC |
| | | ACAGAGCUUCAUCGAAAGAAUGACAAACUUCGACAAGAACCUGC |
| | | CGAACGAAAAGGUCCUGCCGAAGCACAGCCUGCUGUACGAAUACU |
| | | UCACAGUCUACAACGAACUGACAAAGGUCAAGUACGUCACAGAA |
| | | GGAAUGAGAAAGCCGGCAUUCCUGAGCGGAGAACAGAAGAAGGC |
| | | AAUCGUCGACCUGCUGUUCAAGACAAACAGAAAGGUCACAGUCA |
| | | AGCAGCUGAAGGAAGACUACUUCAAGAAGAUCGAAUGCUUCGAC |
| | | AGCGUCGAAAUCAGCGGAGUCGAAGACAGAUUCAACGCAAGCCU |
| | | GGGAACAUACCACGACCUGCUGAAGAUCAUCAAGGACAAGGACU |
| | | UCCUGGACAACGAAGAAAACGAAGACAUCCUGGAAGACAUCGUC |
| | | CUGACACUGACACUGUUCGAAGACAGAGAAAUGAUCGAAGAAAG |
| | | ACUGAAGACAUACGCACACCUGUUCGACGACAAGGUCAUGAAGC |
| | | AGCUGAAGAGAAGAAGAUACACAGGAUGGGGAAGACUGAGCAGA |
| | | AAGCUGAUCAACGGAAUCAGAGACAAGCAGAGCGGAAAGACAAU |
| | | CCUGGACUUCCUGAAGAGCGACGGAUUCGCAAACAGAAACUUCA |
| | | UGCAGCUGAUCCACGACGACAGCCUGACAUUCAAGGAAGACAUCC |
| | | AGAAGGCACAGGUCAGCGGACAGGGAGACAGCCUGCACGAACAC |
| | | AUCGCAAACCUGGCAGGAAGCCCGGCAAUCAAGAAGGGAAUCCU |
| | | GCAGACAGUCAAGGUCGUCGACGAACUGGUCAAGGUCAUGGGAA |
| | | GACACAAGCCGGAAAACAUCGUCAUCGAAAUGGCAAGAGAAAAC |
| | | CAGACAACACAGAAGGGACAGAAGAACAGCAGAGAAAGAAUGAA |
| | | GAGAAUCGAAGAAGGAAUCAAGGAACUGGGAAGCCAGAUCCUGA |
| | | AGGAACACCCGGUCGAAAACACACAGCUGCAGAACGAAAAGCUG |
| | | UACCUGUACUACCUGCAGAACGGAAGAGACAUGUACGUCGACCA |
| | | GGAACUGGACAUCAACAGACUGAGCGACUACGACGUCGACCACAU |
| | | CGUCCCGCAGAGCUUCCUGAAGGACGACAGCAUCGACAACAAGGU |
| | | CCUGACAAGAAGCGACAAGAACAGAGGAAAGAGCGACAACGUCC |
| | | CGAGCGAAGAAGUCGUCAAGAAGAUGAAGAACUACUGGAGACAG |
| | | CUGCUGAACGCAAAGCUGAUCACACAGAGAAAGUUCGACAACCU |
| | | GACAAAGGCAGAGAGAGGAGGACUGAGCGAACUGGACAAGGCAG |
| | | GAUUCAUCAAGAGACAGCUGGUCGAAACAAGACAGAUCACAAAG |
| | | CACGUCGCACAGAUCCUGGACAGCAGAAUGAACACAAAGUACGAC |
| | | GAAAACGACAAGCUGAUCAGAGAAGUCAAGGUCAUCACACUGAA |
| | | GAGCAAGCUGGUCAGCGACUUCAGAAAGGACUUCCAGUUCUACA |
| | | AGGUCAGAGAAAUCAACAACUACCACCACGCACACGACGCAUACC |
| | | UGAACGCAGUCGUCGGAACAGCACUGAUCAAGAAGUACCCGAAG |
| | | CUGGAAAGCGAAUUCGUCUACGGAGACUACAAGGUCUACGACGU |
| | | CAGAAAGAUGAUCGCAAAGAGCGAACAGGAAAUCGGAAAGGCAA |
| | | CAGCAAAGUACUUCUUCUACAGCAACAUCAUGAACUUCUUCAAG |
| | | ACAGAAAUCACACUGGCAAACGGAGAAAUCAGAAAGAGACCGCU |
| | | GAUCGAAACAAACGGAGAAACAGGAGAAAUCGUCUGGGACAAGG |
| | | GAAGAGACUUCGCAACAGUCAGAAAGGUCCUGAGCAUGCCGCAG |
| | | GUCAACAUCGUCAAGAAGACAGAAGUCCAGACAGGAGGAUUCAG |
| | | CAAGGAAAGCAUCCUGCCGAAGAGAAACAGCGACAAGCUGAUCG |
| | | CAAGAAAGAAGGACUGGGACCCGAAGAAGUACGGAGGAUUCGAC |
| | | AGCCCGACAGUCGCAUACAGCGUCCUGGUCGUCGCAAAGGUCGAA |
| | | AAGGGAAAGAGCAAGAAGCUGAAGAGCGUCAAGGAACUGCUGGG |
| | | AAUCACAAUCAUGGAAAGAAGCAGCUUCGAAAAGAACCCGAUCG |
| | | ACUUCCUGGAAGCAAAGGGAUACAAGGAAGUCAAGAAGGACCUG |
| | | AUCAUCAAGCUGCCGAAGUACAGCCUGUUCGAACUGGAAAACGG |
| | | AAGAAAGAGAAUGCUGGCAAGCGCAGGAGAACUGCAGAAGGGAA |
| | | ACGAACUGGCACUGCCGAGCAAGUACGUCAACUUCCUGUACCUGG |
| | | CAAGCCACUACGAAAAGCUGAAGGGAAGCCCGGAAGACAACGAA |
| | | CAGAAGCAGCUGUUCGUCGAACAGCACAAGCACUACCUGGACGAA |
| | | AUCAUCGAACAGAUCAGCGAAUUCAGCAAGAGAGUCAUCCUGGC |
| | | AGACGCAAACCUGGACAAGGUCCUGAGCGCAUACAACAAGCACAG |
| | | AGACAAGCCGAUCAGAGAACAGGCAGAAAACAUCAUCCACCUGU |
| | | UCACACUGACAAACCUGGGAGCACCGGCAGCAUUCAAGUACUUCG |
| | | ACACAACAAUCGACAGAAAGAGAUACACAAGCACAAAGGAAGUC |
| | | CUGGACGCAACACUGAUCCACCAGAGCAUCACAGGACUGUACGAA |
| | | ACAAGAAUCGACCUGAGCCAGCUGGGAGGAGACGGAGGAGGAAG |
| | | CCCGAAGAAGAAGAGAAAGGUCUAG |
| 294 | Amino acid | MDKKYSIGLDIGTNSVGWAVITDEYKVPSKKFKVLGNTDRHSIKKNLI |
| | sequence for Cas9 | GALLFDSGETAEATRLKRTARRRYTRRKNRICYLQEIFSNEMAKVDDS |
| | | FFHRLEESFLVEEDKKHERHPIFGNIVDEVAYHEKYPTIYHLRKKLVDS |
| | | TDKADLRLIYLALAHMIKFRGHFLIEGDLNPDNSDVDKLFIQLVQTYN |
| | | QLFEENPINASGVDAKAILSARLSKSRRLENLIAQLPGEKKNGLFGNLIA |
| | | LSLGLTPNFKSNFDLAEDAKLQLSKDTYDDDLDNLLAQIGDQYADLFL |
| | | AAKNLSDAILLSDILRVNTEITKAPLSASMIKRYDEHHQDLTLLKALVR |
| | | QQLPEKYKEIFFDQSKNGYAGYIDGGASQEEFYKFIKPILEKMDGTEEL |
| | | LVKLNREDLLRKQRTFDNGSIPHQIHLGELHAILRRQEDFYPFLKDNRE |
| | | KIEKILTFRIPYYVGPLARGNSRFAWMTRKSEETITPWNFEEVVDKGAS |
| | | AQSFIERMTNFDKNLPNEKVLPKHSLLYEYFTVYNELTKVKYVTEGMR |
| | | KPAFLSGEQKKAIVDLLFKTNRKVTVKQLKEDYFKKIECFDSVEISGVE |
| | | DRFNASLGTYHDLLKIIKDKDFLDNEENEDILEDIVLTLTLFEDREMIEE |
| | | RLKTYAHLFDDKVMKQLKRRRYTGWGRLSRKLINGIRDKQSGKTILD |
| | | FLKSDGFANRNFMQLIHDDSLTFKEDIQKAQVSGQGDSLHEHIANLAG |
| | | SPAIKKGILQTVKVVDELVKVMGRHKPENIVIEMARENQTTQKGQKNS |
| | | RERMKRIEEGIKELGSQILKEHPVENTQLQNEKLYLYYLQNGRDMYVD |
| | | QELDINRLSDYDVDHIVPQSFLKDDSIDNKVLTRSDKNRGKSDNVPSEE |
| | | VVKKMKNYWRQLLNAKLITQRKFDNLTKAERGGLSELDKAGFIKRQL |
| | | VETRQITKHVAQILDSRMNTKYDENDKLIREVKVITLKSKLVSDFRKDF |
| | | QFYKVREINNYHHAHDAYLNAVVGTALIKKYPKLESEFVYGDYKVYD |
| | | VRKMIAKSEQEIGKATAKYFFYSNIMNFFKTEITLANGEIRKRPLIETNG |
| | | ETGEIVWDKGRDFATVRKVLSMPQVNIVKKTEVQTGGFSKESILPKRN |
| | | SDKLIARKKDWDPKKYGGFDSPTVAYSVLVVAKVEKGKSKKLKSVKE |
| | | LLGITIMERSSFEKNPIDFLEAKGYKEVKKDLIIKLPKYSLFELENGRKR |
| | | MLASAGELQKGNELALPSKYVNFLYLASHYEKLKGSPEDNEQKQLFV |
| | | EQHKHYLDEIIEQISEFSKRVILADANLDKVLSAYNKHRDKPIREQAENI |
| | | IHLFTLTNLGAPAAFKYFDTTIDRKRYTSTKEVLDATLIHQSITGLYETR |
| | | IDLSQLGGDGGGSPKKKRKV |
| 295 | Open reading | AUGGACAAGAAGUACUCCAUCGGCCUGGACAUCGGCACCAACUCC |
| | frame for Cas9 | GUGGGCUGGGCCGUGAUCACCGACGAGUACAAGGUGCCCUCCAAG |
| | | AAGUUCAAGGUGCUGGGCAACACCGACCGGCACUCCAUCAAGAAG |
| | | AACCUGAUCGGCGCCCUGCUGUUCGACUCCGGCGAGACCGCCGAG |
| | | GCCACCCGGCUGAAGCGGACCGCCCGGCGGCGGUACACCCGGCGG |
| | | AAGAACCGGAUCUGCUACCUGCAGGAGAUCUUCUCCAACGAGAU |
| | | GGCCAAGGUGGACGACUCCUUCUUCCACCGGCUGGAGGAGUCCUU |
| | | CCUGGUGGAGGAGGACAAGAAGCACGAGCGGCACCCCAUCUUCGG |
| | | CAACAUCGUGGACGAGGUGGCCUACCACGAGAAGUACCCCACCAU |
| | | CUACCACCUGCGGAAGAAGCUGGUGGACUCCACCGACAAGGCCGA |
| | | CCUGCGGCUGAUCUACCUGGCCCUGGCCCACAUGAUCAAGUUCCG |
| | | GGGCCACUUCCUGAUCGAGGGCGACCUGAACCCCGACAACUCCGA |
| | | CGUGGACAAGCUGUUCAUCCAGCUGGUGCAGACCUACAACCAGCU |
| | | GUUCGAGGAGAACCCCAUCAACGCCUCCGGCGUGGACGCCAAGGC |
| | | CAUCCUGUCCGCCCGGCUGUCCAAGUCCCGGCGGCUGGAGAACCU |
| | | GAUCGCCCAGCUGCCCGGCGAGAAGAAGAACGGCCUGUUCGGCAA |
| | | CCUGAUCGCCCUGUCCCUGGGCCUGACCCCCAACUUCAAGUCCAA |
| | | CUUCGACCUGGCCGAGGACGCCAAGCUGCAGCUGUCCAAGGACAC |
| | | CUACGACGACGACCUGGACAACCUGCUGGCCCAGAUCGGCGACCA |
| | | GUACGCCGACCUGUUCCUGGCCGCCAAGAACCUGUCCGACGCCAU |
| | | CCUGCUGUCCGACAUCCUGCGGGUGAACACCGAGAUCACCAAGGC |
| | | CCCCCUGUCCGCCUCCAUGAUCAAGCGGUACGACGAGCACCACCA |
| | | GGACCUGACCCUGCUGAAGGCCCUGGUGCGGCAGCAGCUGCCCGA |
| | | GAAGUACAAGGAGAUCUUCUUCGACCAGUCCAAGAACGGCUACG |
| | | CCGGCUACAUCGACGGCGGCGCCUCCCAGGAGGAGUUCUACAAGU |
| | | UCAUCAAGCCCAUCCUGGAGAAGAUGGACGGCACCGAGGAGCUGC |
| | | UGGUGAAGCUGAACCGGGAGGACCUGCUGCGGAAGCAGCGGACC |
| | | UUCGACAACGGCUCCAUCCCCCACCAGAUCCACCUGGGCGAGCUG |
| | | CACGCCAUCCUGCGGCGGCAGGAGGACUUCUACCCCUUCCUGAAG |
| | | GACAACCGGGAGAAGAUCGAGAAGAUCCUGACCUUCCGGAUCCCC |
| | | UACUACGUGGGCCCCCUGGCCCGGGGCAACUCCCGGUUCGCCUGG |
| | | AUGACCCGGAAGUCCGAGGAGACCAUCACCCCCUGGAACUUCGAG |
| | | GAGGUGGUGGACAAGGGCGCCUCCGCCCAGUCCUUCAUCGAGCGG |
| | | AUGACCAACUUCGACAAGAACCUGCCCAACGAGAAGGUGCUGCCC |
| | | AAGCACUCCCUGCUGUACGAGUACUUCACCGUGUACAACGAGCUG |
| | | ACCAAGGUGAAGUACGUGACCGAGGGCAUGCGGAAGCCCGCCUUC |
| | | CUGUCCGGCGAGCAGAAGAAGGCCAUCGUGGACCUGCUGUUCAA |
| | | GACCAACCGGAAGGUGACCGUGAAGCAGCUGAAGGAGGACUACU |
| | | UCAAGAAGAUCGAGUGCUUCGACUCCGUGGAGAUCUCCGGCGUG |
| | | GAGGACCGGUUCAACGCCUCCCUGGGCACCUACCACGACCUGCUG |
| | | AAGAUCAUCAAGGACAAGGACUUCCUGGACAACGAGGAGAACGA |
| | | GGACAUCCUGGAGGACAUCGUGCUGACCCUGACCCUGUUCGAGGA |
| | | CCGGGAGAUGAUCGAGGAGCGGCUGAAGACCUACGCCCACCUGUU |
| | | CGACGACAAGGUGAUGAAGCAGCUGAAGCGGCGGCGGUACACCG |
| | | GCUGGGGCCGGCUGUCCCGGAAGCUGAUCAACGGCAUCCGGGACA |
| | | AGCAGUCCGGCAAGACCAUCCUGGACUUCCUGAAGUCCGACGGCU |
| | | UCGCCAACCGGAACUUCAUGCAGCUGAUCCACGACGACUCCCUGA |
| | | CCUUCAAGGAGGACAUCCAGAAGGCCCAGGUGUCCGGCCAGGGCG |
| | | ACUCCCUGCACGAGCACAUCGCCAACCUGGCCGGCUCCCCCGCCA |
| | | UCAAGAAGGGCAUCCUGCAGACCGUGAAGGUGGUGGACGAGCUG |
| | | GUGAAGGUGAUGGGCCGGCACAAGCCCGAGAACAUCGUGAUCGA |
| | | GAUGGCCCGGGAGAACCAGACCACCCAGAAGGGCCAGAAGAACUC |
| | | CCGGGAGCGGAUGAAGCGGAUCGAGGAGGGCAUCAAGGAGCUGG |
| | | GCUCCCAGAUCCUGAAGGAGCACCCCGUGGAGAACACCCAGCUGC |
| | | AGAACGAGAAGCUGUACCUGUACUACCUGCAGAACGGCCGGGAC |
| | | AUGUACGUGGACCAGGAGCUGGACAUCAACCGGCUGUCCGACUAC |
| | | GACGUGGACCACAUCGUGCCCCAGUCCUUCCUGAAGGACGACUCC |
| | | AUCGACAACAAGGUGCUGACCCGGUCCGACAAGAACCGGGGCAAG |
| | | UCCGACAACGUGCCCUCCGAGGAGGUGGUGAAGAAGAUGAAGAA |
| | | CUACUGGCGGCAGCUGCUGAACGCCAAGCUGAUCACCCAGCGGAA |
| | | GUUCGACAACCUGACCAAGGCCGAGCGGGGCGGCCUGUCCGAGCU |
| | | GGACAAGGCCGGCUUCAUCAAGCGGCAGCUGGUGGAGACCCGGCA |
| | | GAUCACCAAGCACGUGGCCCAGAUCCUGGACUCCCGGAUGAACAC |
| | | CAAGUACGACGAGAACGACAAGCUGAUCCGGGAGGUGAAGGUGA |
| | | UCACCCUGAAGUCCAAGCUGGUGUCCGACUUCCGGAAGGACUUCC |
| | | AGUUCUACAAGGUGCGGGAGAUCAACAACUACCACCACGCCCACG |
| | | ACGCCUACCUGAACGCCGUGGUGGGCACCGCCCUGAUCAAGAAGU |
| | | ACCCCAAGCUGGAGUCCGAGUUCGUGUACGGCGACUACAAGGUG |
| | | UACGACGUGCGGAAGAUGAUCGCCAAGUCCGAGCAGGAGAUCGG |
| | | CAAGGCCACCGCCAAGUACUUCUUCUACUCCAACAUCAUGAACUU |
| | | CUUCAAGACCGAGAUCACCCUGGCCAACGGCGAGAUCCGGAAGCG |
| | | GCCCCUGAUCGAGACCAACGGCGAGACCGGCGAGAUCGUGUGGGA |
| | | CAAGGGCCGGGACUUCGCCACCGUGCGGAAGGUGCUGUCCAUGCC |
| | | CCAGGUGAACAUCGUGAAGAAGACCGAGGUGCAGACCGGCGGCU |
| | | UCUCCAAGGAGUCCAUCCUGCCCAAGCGGAACUCCGACAAGCUGA |
| | | UCGCCCGGAAGAAGGACUGGGACCCCAAGAAGUACGGCGGCUUCG |
| | | ACUCCCCCACCGUGGCCUACUCCGUGCUGGUGGUGGCCAAGGUGG |
| | | AGAAGGGCAAGUCCAAGAAGCUGAAGUCCGUGAAGGAGCUGCUG |
| | | GGCAUCACCAUCAUGGAGCGGUCCUCCUUCGAGAAGAACCCCAUC |
| | | GACUUCCUGGAGGCCAAGGGCUACAAGGAGGUGAAGAAGGACCU |
| | | GAUCAUCAAGCUGCCCAAGUACUCCCUGUUCGAGCUGGAGAACGG |
| | | CCGGAAGCGGAUGCUGGCCUCCGCCGGCGAGCUGCAGAAGGGCAA |
| | | CGAGCUGGCCCUGCCCUCCAAGUACGUGAACUUCCUGUACCUGGC |
| | | CUCCCACUACGAGAAGCUGAAGGGCUCCCCCGAGGACAACGAGCA |
| | | GAAGCAGCUGUUCGUGGAGCAGCACAAGCACUACCUGGACGAGA |
| | | UCAUCGAGCAGAUCUCCGAGUUCUCCAAGCGGGUGAUCCUGGCCG |
| | | ACGCCAACCUGGACAAGGUGCUGUCCGCCUACAACAAGCACCGGG |
| | | ACAAGCCCAUCCGGGAGCAGGCCGAGAACAUCAUCCACCUGUUCA |
| | | CCCUGACCAACCUGGGCGCCCCCGCCGCCUUCAAGUACUUCGACA |
| | | CCACCAUCGACCGGAAGCGGUACACCUCCACCAAGGAGGUGCUGG |
| | | ACGCCACCCUGAUCCACCAGUCCAUCACCGGCCUGUACGAGACCC |
| | | GGAUCGACCUGUCCCAGCUGGGCGGCGACGGCGGCGGCUCCCCCA |
| | | AGAAGAAGCGGAAGGUGUGA |
| 296 | Amino acid | MDKKYSIGLDIGTNSVGWAVITDEYKVPSKKFKVLGNTDRHSIKKNLI |
| | sequence for | GALLFDSGETAEATRLKRTARRRYTRRKNRICYLQEIFSNEMAKVDDS |
| | Cas9-NLS | FFHRLEESFLVEEDKKHERHPIFGNIVDEVAYHEKYPTIYHLRKKLVDS |
| | | TDKADLRLIYLALAHMIKFRGHFLIEGDLNPDNSDVDKLFIQLVQTYN |
| | | QLFEENPINASGVDAKAILSARLSKSRRLENLIAQLPGEKKNGLFGNLIA |
| | | LSLGLTPNFKSNFDLAEDAKLQLSKDTYDDDLDNLLAQIGDQYADLFL |
| | | AAKNLSDAILLSDILRVNTEITKAPLSASMIKRYDEHHQDLTLLKALVR |
| | | QQLPEKYKEIFFDQSKNGYAGYIDGGASQEEFYKFIKPILEKMDGTEEL |
| | | LVKLNREDLLRKQRTFDNGSIPHQIHLGELHAILRRQEDFYPFLKDNRE |
| | | KIEKILTFRIPYYVGPLARGNSRFAWMTRKSEETTTPWNFEEVVDKGAS |
| | | AQSFIERMTNFDKNLPNEKVLPKHSLLYEYFTVYNELTKVKYVTEGMR |
| | | KPAFLSGEQKKAIVDLLFKTNRKVTVKQLKEDYFKKIECFDSVEISGVE |
| | | DRFNASLGTYHDLLKIIKDKDFLDNEENEDILEDIVLTLTLFEDREMIEE |
| | | RLKTYAHLFDDKVMKQLKRRRYTGWGRLSRKLINGIRDKQSGKTILD |
| | | FLKSDGFANRNFMQLIHDDSLTFKEDIQKAQVSGQGDSLHEHIANLAG |
| | | SPAIKKGILQTVKVVDELVKVMGRHKPENIVIEMARENQTTQKGQKNS |
| | | RERMKRIEEGIKELGSQILKEHPVENTQLQNEKLYLYYLQNGRDMYVD |
| | | QELDINRLSDYDVDHIVPQSFLKDDSIDNKVLTRSDKNRGKSDNVPSEE |
| | | VVKKMKNYWRQLLNAKLITQRKFDNLTKAERGGLSELDKAGFIKRQL |
| | | VETRQITKHVAQILDSRMNTKYDENDKLIREVKVITLKSKLVSDFRKDF |
| | | QFYKVREINNYHHAHDAYLNAVVGTALIKKYPKLESEFVYGDYKVYD |
| | | VRKMIAKSEQEIGKATAKYFFYSNIMNFFKTEITLANGEIRKRPLIETNG |
| | | ETGEIVWDKGRDFATVRKVLSMPQVNIVKKTEVQTGGFSKESILPKRN |
| | | SDKLIARKKDWDPKKYGGFDSPTVAYSVLVVAKVEKGKSKKLKSVKE |
| | | LLGITIMERSSFEKNPIDFLEAKGYKEVKKDLIIKLPKYSLFELENGRKR |
| | | MLASAGELQKGNELALPSKYVNFLYLASHYEKLKGSPEDNEQKQLFV |
| | | EQHKHYLDEIIEQISEFSKRVILADANLDKVLSAYNKHRDKPIREQAENI |
| | | IHLFTLTNLGAPAAFKYFDTTIDRKRYTSTKEVLDATLIHQSITGLYETR |
| | | IDLSQLGGDGGGSPKKKRKV |
| 297 | TCR insertion | TTGGCCACTCCCTCTCTGCGCGCTCGCTCGCTCACTGAGGCCGGGCG |
| | construct with | ACCAAAGGTCGCCCGACGCCCGGGCTTTGCCCGGGCGGCCTCAGTG |
| | homology arms | AGCGAGCGAGCGCGCAGAGAGGGAGTGGCCAACTCCATCACTAGG |
| | flanking TRAC | GGTTCCTagatcttgccaacataccataaacctcccattctgctaatgcccagcctaagttggggagaccac |
| | G013006 cut site - | tccagattccaagatgtacagtttgctttgctgggcctttttcccatgcctgcctttactctgccagagttatattgctg |
| | ITR included | gggttttgaagaagatcctattaaataaaagaataagcagtattattaagtagccctgcatttcaggtttccttgagtg |
| | | gcaggccaggcctggccgtgaacgttcactgaaatcatggcctcttggccaagattgatagcttgtgcctgtccct |
| | | gagtcccagtccatcacgagcagctggtttctaagatgctatttcccgtataaagcatgagaccgtgacttgccag |
| | | ccccacagagccccgcccttgtccatcactggcatctggactccagcctgggttggggcaaagagggaaatga |
| | | gatcatgtcctaaccctgatcctcttgtcccacagATATCCAGAACCCTGACCCTGCGGCT |
| | | CCGGTGCCCGTCAGTGGGCAGAGCGCACATCGCCCACAGTCCCCGA |
| | | GAAGTTGGGGGGAGGGGTCGGCAATTGAACCGGTGCCTAGAGAAG |
| | | GTGGCGCGGGGTAAACTGGGAAAGTGATGTCGTGTACTGGCTCCGC |
| | | CTTTTTCCCGAGGGTGGGGGAGAACCGTATATAAGTGCAGTAGTCG |
| | | CCGTGAACGTTCTTTTTCGCAACGGGTTTGCCGCCAGAACACAGGT |
| | | AAGTGCCGTGTGTGGTTCCCGCGGGCCTGGCCTCTTTACGGGTTATG |
| | | GCCCTTGCGTGCCTTGAATTACTTCCACGCCCCTGGCTGCAGTACGT |
| | | GATTCTTGATCCCGAGCTTCGGGTTGGAAGTGGGTGGGAGAGTTCG |
| | | AGGCCTTGCGCTTAAGGAGCCCCTTCGCCTCGTGCTTGAGTTGAGG |
| | | CCTGGCTTGGGCGCTGGGGCCGCCGCGTGCGAATCTGGTGGCACCT |
| | | TCGCGCCTGTCTCGCTGCTTTCGATAAGTCTCTAGCCATTTAAAATT |
| | | TTTGATGACCTGCTGCGACGCTTTTTTTCTGGCAAGATAGTCTTGTA |
| | | AATGCGGGCCAAGATgTGCACACTGGTATTTCGGTTTTTGGGGCCGC |
| | | GGGCGGCGACGGGGCCCGTGCGTCCCAGCGCACATGTTCGGCGAG |
| | | GCGGGGCCTGCGAGCGCGGCCACCGAGAATCGGACGGGGGTAGTC |
| | | TCAAGCTGGCCGGCCTGCTCTGGTGCCTGGCCTCGCGCCGCCGTGT |
| | | ATCGCCCCGCCCTGGGCGGCAAGGCTGGCCCGGTCGGCACCAGTTG |
| | | CGTGAGCGGAAAGATGGCCGCTTCCCGGCCCTGCTGCAGGGAGCTC |
| | | AAAATGGAGGACGCGGCGCTCGGGAGAGCGGGCGGGTGAGTCACC |
| | | CACACAAAGGAAAAGGGCCTTTCCGTCCTCAGCCGTCGCTTCATGT |
| | | GACTCCACGGAGTACCGGGCGCCGTCCAGGCACCTCGATTAGTTCT |
| | | CGAGCTTTTGGAGTACGTCGTCTTTAGGTTGGGGGGAGGGGTTTTAT |
| | | GCGATGGAGTTTCCCCACACTGAGTGGGTGGAGACTGAAGTTAGGC |
| | | CAGCTTGGCACTTGATGTAATTCTCCTTGGAATTTGCCCTTTTTGAG |
| | | TTTGGATCTTGGTTCATTCTCAAGCCTCAGACAGTGGTTCAAAGTTT |
| | | TTTTCTTCCATTTCAGGTGTCGTGAtGCGGCCGCCACCATGGCCCTGC |
| | | CCGTGACCGCCCTGCTGCTGCCCCTGGCCCTGCTGCTGCACGCCGCC |
| | | CGGCCCCAGGTGCAGCTGGTGGAGAGCGGCGGCGGCCTGGTGCAG |
| | | CCCGGCGGCAGCCTGCGGCTGAGCTGCGTGGCCAGCGGCTTCACCT |
| | | TCAGCAGCAACGCCATGAGCTGGGTGCGGCAGGCCCCCGGCAAGG |
| | | GCCTGGAGTGGGTGAGCGCCATCAGCGGCAGCGGCGACTACACCC |
| | | ACTACAGCGACAGCGTGAAGGGCCGGTTCACCATCAGCCGGGACA |
| | | ACAGCAAGAACACCCTGTACCTGCAGATGAACAGCCTGCGGGCCG |
| | | AGGACACCGCCGTGTACTACTGCGCCAAGGAGGTGCCCGGCGGCCC |
| | | CCTGGTGGACTTCGACAGCCGGGGCCAGGGCACCCTGGTGACCGTG |
| | | AGCAGCGGCGGCGGCGGCAGCCAGGTGCAGCTGGTGGAGAGCGGC |
| | | GGCGGCCTGGTGCAGCCCGGCGGCAGCCTGCGGCTGAGCTGCGTGG |
| | | CCAGCGGCTTCACCTTCAGCAGCAACGCCATGAGCTGGGTGCGGCA |
| | | GGCCCCCGGCAAGGGCCTGGAGTGGGTGAGCGCCATCAGCGGCAG |
| | | CGGCGACTACACCCACTACAGCGACAGCGTGAAGGGCCGGTTCACC |
| | | ATCAGCCGGGACAACAGCAAGAACACCCTGTACCTGCAGATGAAC |
| | | AGCCTGCGGGCCGAGGACACCGCCGTGTACTACTGCGCCAAGGAG |
| | | GTGCCCGGCGGCCCCCTGGTGGACTTCGACAGCCGGGGCCAGGGCA |
| | | CCCTGGTGACCGTGAGCAGCACCACCACCCCCGCCCCCCGGCCCCC |
| | | CACCCCCGCCCCCACCATCGCCAGCCAGCCCCTGAGCCTGCGGCCC |
| | | GAGGCCTGCCGGCCCGCCGCCGGCGGCGCCGTGCACACCCGGGGCC |
| | | TGGACTTCGCCTGCGACTTCTGGGTGCTGGTGGTGGTGGGCGGCGT |
| | | GCTGGCCTGCTACAGCCTGCTGGTGACCGTGGCCTTCATCATCTTCT |
| | | GGGTGCGGAGCAAGCGGAGCCGGCTGCTGCACAGCGACTACATGA |
| | | ACATGACCCCCCGGCGGCCCGGCCCCACCCGGAAGCACTACCAGCC |
| | | CTACGCCCCCCCCCGGGACTTCGCCGCCTACCGGAGCCGGGTGAAG |
| | | TTCAGCCGGAGCGCCGACGCCCCCGCCTACCAGCAGGGCCAGAACC |
| | | AGCTGTACAACGAGCTGAACCTGGGCCGGCGGGAGGAGTACGACG |
| | | TGCTGGACAAGCGGCGGGGCCGGGACCCCGAGATGGGCGGCAAGC |
| | | CCCGGCGGAAGAACCCCCAGGAGGGCCTGTACAACGAGCTGCAGA |
| | | AGGACAAGATGGCCGAGGCCTACAGCGAGATCGGCATGAAGGGCG |
| | | AGCGGCGGCGGGGCAAGGGCCACGACGGCCTGTACCAGGGCCTGA |
| | | GCACCGCCACCAAGGACACCTACGACGCCCTGCACATGCAGGCCCT |
| | | GCCCCCCCGGTAATGACCTCGACTGTGCCTTCTAGTTGCCAGCCATC |
| | | TGTTGTTTGCCCCTCCCCCGTGCCTTCCTTGACCCTGGAAGGTGCCA |
| | | CTCCCACTGTCCTTTCCTAATAAAATGAGGAAATTGCATCGCATTGT |
| | | CTGAGTAGGTGTCATTCTATTCTGGGGGGTGGGGTGGGGCAGGACA |
| | | GCAAGGGGGAGGATTGGGAAGACAATAGCAGGCATGCTGGGGATG |
| | | CGGTGGGCTCTATGGCTTCTGAGGCGGAAAGAACCAGCTGGGGCTC |
| | | TAGGGGGTATCCCCACTAGTCGTGTACCAGCTGAGAGACTCTAAAT |
| | | CCAGTGACAAGTCTGTCTGCCTATTCACCGATTTTGATTCTCAAACA |
| | | AATGTGTCACAAAGTAAGGATTCTGATGTGTATATCACAGACAAAA |
| | | CTGTGCTAGACATGAGGTCTATGGACTTCAAGAGCAACAGTGCTGT |
| | | GGCCTGGAGCAACAAATCTGACTTTGCATGTGCAAACGCCTTCAAC |
| | | AACAGCATTATTCCAGAAGACACCTTCTTCCCCAGCCCAGgtaagggcag |
| | | ctttggtgccttcgcaggctgtttccttgcttcaggaatggccaggttctgcccagagctctggtcaatgatgtctaa |
| | | aactcctctgattggtggtctcggccttatccattgccaccaaaaccctctttttactaagaaacagtgagccttgttc |
| | | tggcagtccagagaatgacacgggaaaaaagcagatgaagagaaggtggcaggagagggcacgtggccca |
| | | gcctcagtctctAGATCTAGGAACCCCTAGTGATGGAGTTGGCCACTCCCT |
| | | CTCTGCGCGCTCGCTCGCTCACTGAGGCCGCCCGGGCAAAGCCCGG |
| | | GCGTCGGGCGACCTTTGGTCGCCCGGCCTCAGTGAGCGAGCGAGCG |
| | | CGCAGAGAGGGAGTGGCCAA |
| 298 | bidirectional | taggtcagtgaagagaagaacaaaaagcagcatattacagttagttgtcttcatcaatctttaaatatgttgtgtggtt |
| | SERPINA | tttctctccctgtttccacagttGAGGACCCCCAGGGCGACGCCGCCCAGAAGACC |
| | insertion | GACACCAGCCACCACGACCAGGACCACCCCACCTTCAACAAGATCA |
| | construct | CCCCCAACCTGGCCGAGTTCGCCTTCAGCCTGTACAGGCAGCTGGC |
| | | CCACCAGAGCAACAGCACCAACATCTTCTTCAGCCCCGTGAGCATC |
| | | GCCACCGCCTTCGCCATGCTGAGCCTGGGCACCAAGGCCGACACCC |
| | | ACGACGAGATCCTGGAGGGCCTGAACTTCAACCTGACCGAGATCCC |
| | | CGAGGCCCAGATCCACGAGGGCTTCCAGGAGCTGCTGAGGACCCTG |
| | | AACCAGCCCGACAGCCAGCTGCAGCTGACCACCGGCAACGGCCTGT |
| | | TCCTGAGCGAGGGCCTGAAGCTGGTGGACAAGTTCCTGGAGGACGT |
| | | GAAGAAGCTGTACCACAGCGAGGCCTTCACCGTGAACTTCGGCGAC |
| | | ACCGAGGAGGCCAAGAAGCAGATCAACGACTACGTGGAGAAGGGC |
| | | ACCCAGGGCAAGATCGTGGACCTGGTGAAGGAGCTGGACAGGGAC |
| | | ACCGTGTTCGCCCTGGTGAACTACATCTTCTTCAAGGGCAAGTGGG |
| | | AGAGGCCCTTCGAGGTGAAGGACACCGAGGAGGAGGACTTCCACG |
| | | TGGACCAGGTGACCACCGTGAAGGTGCCCATGATGAAGAGGCTGG |
| | | GCATGTTCAACATCCAGCACTGCAAGAAGCTGAGCAGCTGGGTGCT |
| | | GCTGATGAAGTACCTGGGCAACGCCACCGCCATCTTCTTCCTGCCC |
| | | GACGAGGGCAAGCTGCAGCACCTGGAGAACGAGCTGACCCACGAC |
| | | ATCATCACCAAGTTCCTGGAGAACGAGGACAGGAGGAGCGCCAGC |
| | | CTGCACCTGCCCAAGCTGAGCATCACCGGCACCTACGACCTGAAGA |
| | | GCGTGCTGGGCCAGCTGGGCATCACCAAGGTGTTCAGCAACGGCGC |
| | | CGACCTGAGCGGCGTGACCGAGGAGGCCCCCCTGAAGCTGAGCAA |
| | | GGCCGTGCACAAGGCCGTGCTGACCATCGACGAGAAGGGCACCGA |
| | | GGCCGCCGGCGCCATGTTCCTGGAGGCCATCCCCATGAGCATCCCC |
| | | CCCGAGGTGAAGTTCAACAAGCCCTTCGTGTTCCTGATGATCGAGC |
| | | AGAACACCAAGAGCCCCCTGTTCATGGGCAAGGTGGTGAACCCCAC |
| | | CCAGAAGTAACAGACATGATAAGATACATTGATGAGTTTGGACAAA |
| | | CCACAACTAGAATGCAGTGAAAAAAATGCTTTATTTGTGAAATTTG |
| | | TGATGCTATTGCTTTATTTGTAACCATTATAAGCTGCAATAAACAAG |
| | | TTAACAACAACAATTGCATTCATTTTATGTTTCAGGTTCAGGGGGAG |
| | | GTGTGGGAGGTTTTTTggggataccccctagagccccagctggttctttccgcctcagaagCC |
| | | ATAGAGCCCACCGCATCCCCAGCATGCCTGCTATTGTCTTCCCAATC |
| | | CTCCCCCTTGCTGTCCTGCCCCACCCCACCCCCCAGAATAGAATGAC |
| | | ACCTACTCAGACAATGCGATGCAATTTCCTCATTTTATTAGGAAAG |
| | | GACAGTGGGAGTGGCACCTTCCAGGGTCAAGGAAGGCACGGGGGA |
| | | GGGGCAAACAACAGATGGCTGGCAACTAGAAGGCACAGTCGaggttaT |
| | | TTTTGGGTGGGATTCACCACTTTTCCCATGAAGAGGGGAGACTTGG |
| | | TATTTTGTTCAATCATTAAGAAGACAAAGGGTTTGTTGAACTTGACC |
| | | TCGGGGGGGATAGACATGGGTATGGCCTCTAAAAACATGGCCCCAG |
| | | CAGCTTCAGTCCCTTTCTCGTCGATGGTCAGCACAGCCTTATGCACG |
| | | GCCTTGGAGAGCTTCAGGGGTGCCTCCTCTGTGACCCCGGAGAGGT |
| | | CAGCCCCATTGCTGAAGACCTTAGTGATGCCCAGTTGACCCAGGAC |
| | | GCTCTTCAGATCATAGGTTCCAGTAATGGACAGTTTGGGTAAATGT |
| | | AAGCTGGCAGACCTTCTGTCTTCATTTTCCAGGAACTTGGTGATGAT |
| | | ATCGTGGGTGAGTTCATTTTCCAGGTGCTGTAGTTTCCCCTCATCAG |
| | | GCAGGAAGAAGATGGCGGTGGCATTGCCCAGGTATTTCATCAGCAG |
| | | CACCCAGCTGGACAGCTTCTTACAGTGCTGGATGTTAAACATGCCT |
| | | AAACGCTTCATCATAGGCACCTTCACGGTGGTCACCTGGTCCACGT |
| | | GGAAGTCCTCTTCCTCGGTGTCCTTGACTTCAAAGGGTCTCTCCCAT |
| | | TTGCCTTTAAAGAAGATGTAATTCACCAGAGCAAAAACTGTGTCTC |
| | | TGTCAAGCTCCTTGACCAAATCCACAATTTTCCCTTGAGTACCCTTC |
| | | TCCACGTAATCGTTGATCTGTTTCTTGGCCTCTTCGGTGTCCCCGAA |
| | | GTTGACAGTGAAGGCTTCTGAGTGGTACAACTTTTTAACATCCTCCA |
| | | AAAACTTATCCACTAGCTTCAGGCCCTCGCTGAGGAACAGGCCATT |
| | | GCCGGTGGTCAGCTGGAGCTGGCTGTCTGGCTGGTTGAGGGTACGG |
| | | AGGAGTTCCTGGAAGCCTTCATGGATCTGAGCCTCCGGAATCTCCG |
| | | TGAGGTTGAAATTCAGGCCCTCCAGGATTTCATCGTGAGTGTCAGC |
| | | CTTGGTCCCCAGGGAGAGCATTGCAAAGGCTGTAGCGATGCTCACT |
| | | GGGGAGAAGAAGATATTGGTGCTGTTGGACTGGTGTGCCAGCTGGC |
| | | GGTATAGGCTGAAGGCGAACTCAGCCAGGTTGGGGGTGATCTTGTT |
| | | GAAGGTTGGGTGATCCTGATCATGGTGGGATGTATCTGTCTTCTGG |
| | | GCAGCATCTCCCTGGGGATCCTCaactgtggaaacagggagagaaaaaccacacaacat |
| | | atttaaagattgatgaagacaactaactgtaatatgctgctttttgttcttctcttcactgaccta |
| 299 | Template A eGFP | tggccctggctttggcagcctgtgctgacccatgcagtcctccttaccatccctccctcgacttcccctcttccgatg |
| | insertion | ttgagcccctccagccggtcctggactttgtctccttccctgccctgccctctcctgaacctgagccagctcccata |
| | construct with | gctcagtctggtctatctgcctggccctggccattgtcactttgcgctgccctcctctcgcccccgagtgcccttgct |
| | homology arms to | gtgccgccggaactctgccctctaacgctgccgtctctctcctgagtccggaccactttgagctctactggcttctg |
| | mouse AAVS1 | cgccgcctctggcccactgtttccccttcccaggcaggtcctgctttctctgacctgcattctctcccctgggcctgt |
| | | gccgctttctgtctgcagcttgtggcctgggtcacctctacggctggcccagatccttccctgccgcctccttcagg |
| | | ttccgtcttcctccactccctcttccccttgctctctgctgtgttgctgcccaaggatgctctttccggagcacttcctt |
| | | ctcggcgctgcaccacgtgatgtcctctgagcggatcctccccgtgtctgggtcctctccgggcatctctcctccc |
| | | tcacccaaccccatgccgtcttcactcgctgggttcccttttccttctccttctggggcctgtgccatctctcgtttctt |
| | | aggatggccttctccgacggatgtctcccttgcgtcccgcctccccttcttgtaggcctgcatcatcaccgtttttct |
| | | ggacaaccccaaagtaccccgtctccctggctttagccaccttccatcctcttgctttctttgcctggacaccccgt |
| | | tctcctgtggattcgggtcacctctcactcctttcatttgggcagctcccctaccccccttacctctctagtctgtgcta |
| | | gctcttccagccctagttattaatgagtaattcatacaaaaggactcgcccctgccttggggaatcccagggaccg |
| | | tcgttaaactcccactaacgtagaacccagagatcgctgcgttcccgccccctcacccgcccgctctcgtcatca |
| | | ctgaggtggagaagagcatgcgtgaggctccggtgcccgtcagtgggcagagcgcacatcgcccacagtccc |
| | | cgagaagttggggggaggggtcggcaattgaaccggtgcctagagaaggtggcgcggggtaaactgggaaa |
| | | gtgatgtcgtgtactggctccgcctttttcccgaggggggggagaaccgtatataagtgcagtagtcgccgtga |
| | | acgttctttttcgcaacgggtttgccgccagaacacaggtaagtgccgtgtgtggttcccgcgggcctggcctcttt |
| | | acgggttatggcccttgcgtgccttgaattacttccacgcccctggctgcagtacgtgattcttgatcccgagcttc |
| | | gggttggaagtgggtgggagagttcgaggccttgcgcttaaggagccccttcgcctcgtgcttgagttgaggcct |
| | | ggcttgggcgctggggccgccgcgtgcgaatctggtggcaccttcgcgcctgtctcgctgctttcgataagtctc |
| | | tagccatttaaaatttttgatgacctgctgcgacgctttttttctggcaagatagtcttgtaaatgcgggccaaCatct |
| | | gcacactggtatttcggtttttggggccgcgggcggcgacggggcccgtgcgtcccagcgcacatgttcggcg |
| | | aggcggggcctgcgagcgcggccaccgagaatcggacgggggtagtctcaagctggccggcctgctctggt |
| | | gcctggcctcgcgccgccgtgtatcgccccgccctgggcggcaaggctggcccggtcggcaccagttgcgtg |
| | | agcggaaagatggccgcttcccggccctgctgcagggagctcaaaatggaggacgcggcgctcgggagagc |
| | | ggggggtgagtcacccacacaaaggaaaagggcctttccgtcctcagccgtcgcttcatgtgactccacgga |
| | | gtaccgggcgccgtccaggcacctcgattagttctcgagcttttggagtacgtcgtctttaggttggggggaggg |
| | | gttttatgcgatggagtttccccacactgagtgggtggagactgaagttaggccagcttggcacttgatgtaattct |
| | | ccttggaatttgccctttttgagtttggatcttggttcattctcaagcctcagacagtggttcaaagtttttttcttccattt |
| | | caggtgtcgtgacgctagcgctaccggactcaatctcgagctcaagcttcgaattctgcagtcgacggtaccgcg |
| | | ggcccgggatccaccggtcgccaccATGgtgAGCAAGGGCGAGGAGCTGTTCACC |
| | | GGGGTGGTGCCCATCCTGGTCGAGCTGGACGGCGACGTAAACGGCC |
| | | ACAAGTTCAGCGTGTCCGGCGAGGGCGAGGGCGATGCCACCTACG |
| | | GCAAGCTGACCCTGAAGTTCATCTGCACCACCGGCAAGCTGCCCGT |
| | | GCCCTGGCCCACCCTCGTGACCACCCTGACCTACGGCGTGCAGTGC |
| | | TTCAGCCGCTACCCCGACCACATGAAGCAGCACGACTTCTTCAAGT |
| | | CCGCCATGCCCGAAGGCTACGTCCAGGAGCGCACCATCTTCTTCAA |
| | | GGACGACGGCAACTACAAGACCCGCGCCGAGGTGAAGTTCGAGGG |
| | | CGACACCCTGGTGAACCGCATCGAGCTGAAGGGCATCGACTTCAAG |
| | | GAGGACGGCAACATCCTGGGGCACAAGCTGGAGTACAACTACAAC |
| | | AGCCACAACGTCTATATCATGGCCGACAAGCAGAAGAACGGCATC |
| | | AAGGTGAACTTCAAGATCCGCCACAACATCGAGGACGGCAGCGTG |
| | | CAGCTCGCCGACCACTACCAGCAGAACACCCCCATCGGCGACGGCC |
| | | CCGTGCTGCTGCCCGACAACCACTACCTGAGCACCCAGTCCGCCCT |
| | | GAGCAAAGACCCCAACGAGAAGCGCGATCACATGGTCCTGCTGGA |
| | | GTTCGTGACCGCCGCCGGGATCACTCTCGGCATGGACGAGCTGTAC |
| | | AAGTAAtagcggccgcgactctagatcataatcagccataccacatttgtagaggttttacttgctttaaaaaa |
| | | cctcccacacctccccctgaacctgaaacataaaatgaatgcaattgttgttgttaacttgtttattgcagcttataatg |
| | | gttacaaataaagcaatagcatcacaaatttcacaaataaagcatttttttcactgcattctagttgtggtttgtccaaa |
| | | ctcatcaatgtatcttaaggcgttgggaccaccttatattcccagggccggttaatgtggctctggttctgggtacttt |
| | | tatctgtcccctccaccccacagtggggccactagggacaggattggtgacagaaaagccccatccttaggcct |
| | | cctccttcctagtctcctgatattgggtctaacccccacctcctgttaggcagattccttatctggtgacacaccccc |
| | | atttcctggagccatctctctccttgccagaacctctaaggtttgcttacgatggagccagagaggatcctgggag |
| | | ggagagcttggcaggggggggagggaagggggggatgcgtgacctgcccggttctcagtggccaccctgc |
| | | gctaccctctcccagaacctgagctgctctgacgcggccgtctggtgcgtttcactgatcctggtgctgcagcttc |
| | | cttacacttcccaagaggagaagcagtttggaaaaacaaaatcagaataagttggtcctgagttctaactttggctc |
| | | ttcacctttctagtccccaatttatattgttcctccgtgcgtcagttttacctgtgagataaggccagtagccagcccc |
| | | gtcctggcagggctgtggtgaggaggggggtgtccgtgtggaaaactccctttgtgagaatggtgcgtcctagg |
| | | tgttcaccaggtcgtggccgcctctactccctttctctttctccatccttctttccttaaagagtccccagtgctatctg |
| | | ggacatattcctccgcccagagcagggtcccgcttccctaaggccctgctctgggcttctgggtttgagtccttgg |
| | | caagcccaggagaggcgctcaggcttccctgtcccccttcctcgtccaccatctcatgcccctggctctcctgcc |
| | | ccttccctacaggggttcctggctctgctcttcagactgagccccgttcccctgcatc |
| 300 | Template B eGFP | ccctgccctgccctctcctgaacctgagccagctcccatagctcagtctggtctatctgcctggccctggccattgt |
| | insertion | cactttgcgctgccctcctctcgcccccgagtgcccttgctgtgccgccggaactctgccctctaacgctgccgtc |
| | construct with | tctctcctgagtccggaccactttgagctctactggcttctgcgccgcctctggcccactgtttccccttcccaggc |
| | homology arms tc | aggtcctgctttctctgacctgcattctctcccctgggcctgtgccgctttctgtctgcagcttgtggcctgggtcac |
| | mouse AAVS1 | ctctacggctggcccagatccttccctgccgcctccttcaggttccgtcttcctccactccctcttccccttgctctct |
| | | gctgtgttgctgcccaaggatgctctttccggagcacttccttctcggcgctgcaccacgtgatgtcctctgagcg |
| | | gatcctccccgtgtctgggtcctctccgggcatctctcctccctcacccaaccccatgccgtcttcactcgctgggt |
| | | tcccttttccttctccttctggggcctgtgccatctctcgtttcttaggatggccttctccgacggatgtctcccttgcgt |
| | | cccgcctccccttcttgtaggcctgcatcatcaccgtttttctggacaaccccaaagtaccccgtctccctggcttta |
| | | gccacctctccatcctcttgctttctttgcctggacaccccgttctcctgtggattcgggtcacctctcactcctttcatt |
| | | tgggcagctcccctaccccccttacctctctagtctgtgctagctcttccagccccctgtcatggcatcttccaggg |
| | | gtccgagagctcagctagtcttcttcctccaacccgggcccctatgtccacttcaggacagcatgtttgctgcctcc |
| | | agggatcctgtgtccctagttattaatgagtaattcatacaaaaggactcgcccctgccttggggaatcccaggga |
| | | ccgtcgttaaactcccactaacgtagaacccagagatcgctgcgttcccgccccctcacccgcccgctctcgtca |
| | | tcactgaggtggagaagagcatgcgtgaggctccggtgcccgtcagtgggcagagcgcacatcgcccacagt |
| | | ccccgagaagttggggggaggggtcggcaattgaaccggtgcctagagaaggtggcgcggggtaaactggg |
| | | aaagtgatgtcgtgtactggctccgcctttttcccgaggggggggagaaccgtatataagtgcagtagtcgccgt |
| | | gaacgttctttttcgcaacgggtttgccgccagaacacaggtaagtgccgtgtgtggttcccgcgggcctggcct |
| | | ctttacgggttatggcccttgcgtgccttgaattacttccacgcccctggctgcagtacgtgattcttgatcccgagc |
| | | ttcgggttggaagtgggtgggagagttcgaggccttgcgcttaaggagccccttcgcctcgtgcttgagttgagg |
| | | cctggcttgggcgctggggccgccgcgtgcgaatctggtggcaccttcgcgcctgtctcgctgctttcgataagt |
| | | ctctagccatttaaaatttttgatgacctgctgcgacgctttttttctggcaagatagtcttgtaaatgcgggccaaCa |
| | | tctgcacactggtatttcggtttttggggccggggggcgacggggcccgtgcgtcccagcgcacatgttcgg |
| | | cgaggcggggcctgcgagcgcggccaccgagaatcggacgggggtagtctcaagctggccggcctgctctg |
| | | gtgcctggcctcgcgccgccgtgtatcgccccgccctgggcggcaaggctggcccggtcggcaccagttgcg |
| | | tgagcggaaagatggccgcttcccggccctgctgcagggagctcaaaatggaggacgcggcgctcgggaga |
| | | gcggggggtgagtcacccacacaaaggaaaagggcctttccgtcctcagccgtcgcttcatgtgactccacg |
| | | gagtaccgggcgccgtccaggcacctcgattagttctcgagcttttggagtacgtcgtctttaggttggggggag |
| | | gggttttatgcgatggagtttccccacactgagtgggtggagactgaagttaggccagcttggcacttgatgtaatt |
| | | ctccttggaatttgccctttttgagtttggatcttggttcattctcaagcctcagacagtggttcaaagtttttttcttccat |
| | | ttcaggtgtcgtgacgctagcgctaccggactcaatctcgagctcaagcttcgaattctgcagtcgacggtaccg |
| | | cgggcccgggatccaccggtcgccaccATGgtgAGCAAGGGCGAGGAGCTGTTCAC |
| | | CGGGGTGGTGCCCATCCTGGTCGAGCTGGACGGCGACGTAAACGGC |
| | | CACAAGTTCAGCGTGTCCGGCGAGGGCGAGGGCGATGCCACCTACG |
| | | GCAAGCTGACCCTGAAGTTCATCTGCACCACCGGCAAGCTGCCCGT |
| | | GCCCTGGCCCACCCTCGTGACCACCCTGACCTACGGCGTGCAGTGC |
| | | TTCAGCCGCTACCCCGACCACATGAAGCAGCACGACTTCTTCAAGT |
| | | CCGCCATGCCCGAAGGCTACGTCCAGGAGCGCACCATCTTCTTCAA |
| | | GGACGACGGCAACTACAAGACCCGCGCCGAGGTGAAGTTCGAGGG |
| | | CGACACCCTGGTGAACCGCATCGAGCTGAAGGGCATCGACTTCAAG |
| | | GAGGACGGCAACATCCTGGGGCACAAGCTGGAGTACAACTACAAC |
| | | AGCCACAACGTCTATATCATGGCCGACAAGCAGAAGAACGGCATC |
| | | AAGGTGAACTTCAAGATCCGCCACAACATCGAGGACGGCAGCGTG |
| | | CAGCTCGCCGACCACTACCAGCAGAACACCCCCATCGGCGACGGCC |
| | | CCGTGCTGCTGCCCGACAACCACTACCTGAGCACCCAGTCCGCCCT |
| | | GAGCAAAGACCCCAACGAGAAGCGCGATCACATGGTCCTGCTGGA |
| | | GTTCGTGACCGCCGCCGGGATCACTCTCGGCATGGACGAGCTGTAC |
| | | AAGTAAtagcggccgcgactctagatcataatcagccataccacatttgtagaggttttacttgctttaaaaaa |
| | | cctcccacacctccccctgaacctgaaacataaaatgaatgcaattgttgttgttaacttgtttattgcagcttataatg |
| | | gttacaaataaagcaatagcatcacaaatttcacaaataaagcatttttttcactgcattctagttgtggtttgtccaaa |
| | | ctcatcaatgtatcttaaggcgtagaaaagccccatccttaggcctcctccttcctagtctcctgatattgggtctaac |
| | | ccccacctcctgttaggcagattccttatctggtgacacacccccatttcctggagccatctctctccttgccagaac |
| | | ctctaaggtttgcttacgatggagccagagaggatcctgggagggagagcttggcagggggtgggagggaag |
| | | ggggggatgcgtgacctgcccggttctcagtggccaccctgcgctaccctctcccagaacctgagctgctctga |
| | | cgcggccgtctggtgcgtttcactgatcctggtgctgcagcttccttacacttcccaagaggagaagcagtttgga |
| | | aaaacaaaatcagaataagttggtcctgagttctaactttggctcttcacctttctagtccccaatttatattgttcctcc |
| | | gtgcgtcagttttacctgtgagataaggccagtagccagccccgtcctggcagggctgtggtgaggagggggg |
| | | tgtccgtgtggaaaactccctttgtgagaatggtgcgtcctaggtgttcaccaggtcgtggccgcctctactcccttt |
| | | ctctttctccatccttctttccttaaagagtccccagtgctatctgggacatattcctccgcccagagcagggtcccg |
| | | cttccctaaggccctgctctgggcttctgggtttgagtccttggcaagcccaggagaggcgctcaggcttccctgt |
| | | cccccttcctcgtccaccatctcatgcccctggctctcctgccccttccctacaggggttcctggctctgctcttcag |
| | | actgagccccgttcccctgcatccccgttcccctgcatcccccttcccctgcatcccccagaggccccaggccac |
| | | ctacttggcctggaccccacgagaggccaccccagccctgtctaccaggctgcct |
| 301 | Template C eGFP | taacgctgccgtctctctcctgagtccggaccactttgagctctactggcttctgcgccgcctctggcccactgtttc |
| | insertion | cccttcccaggcaggtcctgctttctctgacctgcattctctcccctgggcctgtgccgctttctgtctgcagcttgtg |
| | construct with | gcctgggtcacctctacggctggcccagatccttccctgccgcctccttcaggttccgtcttcctccactccctcttc |
| | homology arms to | cccttgctctctgctgtgttgctgcccaaggatgctctttccggagcacttccttctcggcgctgcaccacgtgatgt |
| | mouse AAVS1 | cctctgagcggatcctccccgtgtctgggtcctctccgggcatctctcctccctcacccaaccccatgccgtcttca |
| | | ctcgctgggttcccttttccttctccttctggggcctgtgccatctctcgtttcttaggatggccttctccgacggatgt |
| | | ctcccttgcgtcccgcctccccttcttgtaggcctgcatcatcaccgtttttctggacaaccccaaagtaccccgtct |
| | | ccctggctttagccacctctccatcctcttgctttctttgcctggacaccccgttctcctgtggattcgggtcacctctc |
| | | actcctttcatttgggcagctcccctaccccccttacctctctagtctgtgctagctcttccagccccctgtcatggca |
| | | tcttccaggggtccgagagctcagctagtcttcttcctccaacccgggcccctatgtccacttcaggacagcatgtt |
| | | tgctgcctccagggatcctgtgtccccgagctgggaccaccttatattcccagggccggttaatgtggctctggtt |
| | | ctgggtacttttatctgtcccctccaccccacagtggggccactagggacaggattggtgacagaaaagccccat |
| | | ccttaggcctcctcctagttattaatgagtaattcatacaaaaggactcgcccctgccttggggaatcccagggac |
| | | cgtcgttaaactcccactaacgtagaacccagagatcgctgcgttcccgccccctcacccgcccgctctcgtcat |
| | | cactgaggtggagaagagcatgcgtgaggctccggtgcccgtcagtgggcagagcgcacatcgcccacagtc |
| | | cccgagaagttggggggaggggtcggcaattgaaccggtgcctagagaaggtggcgcggggtaaactggga |
| | | aagtgatgtcgtgtactggctccgcctttttcccgaggggggggagaaccgtatataagtgcagtagtcgccgt |
| | | gaacgttctttttcgcaacgggtttgccgccagaacacaggtaagtgccgtgtgtggttcccgcgggcctggcct |
| | | ctttacgggttatggcccttgcgtgccttgaattacttccacgcccctggctgcagtacgtgattcttgatcccgagc |
| | | ttcgggttggaagtgggtgggagagttcgaggccttgcgcttaaggagccccttcgcctcgtgcttgagttgagg |
| | | cctggcttgggcgctggggccgccgcgtgcgaatctggtggcaccttcgcgcctgtctcgctgctttcgataagt |
| | | ctctagccatttaaaatttttgatgacctgctgcgacgctttttttctggcaagatagtcttgtaaatgcgggccaaCa |
| | | tctgcacactggtatttcggtttttggggccgcgggcggcgacggggcccgtgcgtcccagcgcacatgttcgg |
| | | cgaggggggcctgcgagcgcggccaccgagaatcggacgggggtagtctcaagctggccggcctgctctg |
| | | gtgcctggcctcgcgccgccgtgtatcgccccgccctgggggcaaggctggcccggtcggcaccagttgcg |
| | | tgagcggaaagatggccgcttcccggccctgctgcagggagctcaaaatggaggacgcggcgctcgggaga |
| | | gcggggggtgagtcacccacacaaaggaaaagggcctttccgtcctcagccgtcgcttcatgtgactccacg |
| | | gagtaccgggcgccgtccaggcacctcgattagttctcgagcttttggagtacgtcgtctttaggttggggggag |
| | | gggttttatgcgatggagtttccccacactgagtgggtggagactgaagttaggccagcttggcacttgatgtaatt |
| | | ctccttggaatttgccctttttgagtttggatcttggttcattctcaagcctcagacagtggttcaaagtttttttcttccat |
| | | ttcaggtgtcgtgacgctagcgctaccggactcaatctcgagctcaagcttcgaattctgcagtcgacggtaccg |
| | | cgggcccgggatccaccggtcgccaccATGgtgAGCAAGGGCGAGGAGCTGTTCAC |
| | | CGGGGTGGTGCCCATCCTGGTCGAGCTGGACGGCGACGTAAACGGC |
| | | CACAAGTTCAGCGTGTCCGGCGAGGGCGAGGGCGATGCCACCTACG |
| | | GCAAGCTGACCCTGAAGTTCATCTGCACCACCGGCAAGCTGCCCGT |
| | | GCCCTGGCCCACCCTCGTGACCACCCTGACCTACGGCGTGCAGTGC |
| | | TTCAGCCGCTACCCCGACCACATGAAGCAGCACGACTTCTTCAAGT |
| | | CCGCCATGCCCGAAGGCTACGTCCAGGAGCGCACCATCTTCTTCAA |
| | | GGACGACGGCAACTACAAGACCCGCGCCGAGGTGAAGTTCGAGGG |
| | | CGACACCCTGGTGAACCGCATCGAGCTGAAGGGCATCGACTTCAAG |
| | | GAGGACGGCAACATCCTGGGGCACAAGCTGGAGTACAACTACAAC |
| | | AGCCACAACGTCTATATCATGGCCGACAAGCAGAAGAACGGCATC |
| | | AAGGTGAACTTCAAGATCCGCCACAACATCGAGGACGGCAGCGTG |
| | | CAGCTCGCCGACCACTACCAGCAGAACACCCCCATCGGCGACGGCC |
| | | CCGTGCTGCTGCCCGACAACCACTACCTGAGCACCCAGTCCGCCCT |
| | | GAGCAAAGACCCCAACGAGAAGCGCGATCACATGGTCCTGCTGGA |
| | | GTTCGTGACCGCCGCCGGGATCACTCTCGGCATGGACGAGCTGTAC |
| | | AAGTAAtagcggccgcgactctagatcataatcagccataccacatttgtagaggttttacttgctttaaaaaa |
| | | cctcccacacctccccctgaacctgaaacataaaatgaatgcaattgttgttgttaacttgtttattgcagcttataatg |
| | | gttacaaataaagcaatagcatcacaaatttcacaaataaagcatttttttcactgcattctagttgtggtttgtccaaa |
| | | ctcatcaatgtatcttaaggcgttacgatggagccagagaggatcctgggagggagagcttggcagggggtgg |
| | | gagggaagggggggatgcgtgacctgcccggttctcagtggccaccctgcgctaccctctcccagaacctgag |
| | | ctgctctgacgcggccgtctggtgcgtttcactgatcctggtgctgcagcttccttacacttcccaagaggagaag |
| | | cagtttggaaaaacaaaatcagaataagttggtcctgagttctaactttggctcttcacctttctagtccccaatttata |
| | | ttgttcctccgtgcgtcagttttacctgtgagataaggccagtagccagccccgtcctggcagggctgtggtgagg |
| | | aggggggtgtccgtgtggaaaactccctttgtgagaatggtgcgtcctaggtgttcaccaggtcgtggccgcctc |
| | | tactccctttctctttctccatccttctttccttaaagagtccccagtgctatctgggacatattcctccgcccagagca |
| | | gggtcccgcttccctaaggccctgctctgggcttctgggtttgagtccttggcaagcccaggagaggcgctcag |
| | | gcttccctgtcccccttcctcgtccaccatctcatgcccctggctctcctgccccttccctacaggggttcctggctc |
| | | tgctcttcagactgagccccgttcccctgcatccccgttcccctgcatcccccttcccctgcatcccccagaggcc |
| | | ccaggccacctacttggcctggaccccacgagaggccaccccagccctgtctaccaggctgccttttgggtgga |
| | | ttctcctccaactgtggggtgactgcttggcaaactcactcttcggggtatcccaggaggcctggagcattggggt |
| | | gggctggggttcagagaggagggattcccttctcaggttacgtggccaagaagcaggggagc |
| 302 | Template D eGFP | gtttccccttcccaggcaggtcctgctttctctgacctgcattctctcccctgggcctgtgccgctttctgtctgcagc |
| | insertion | ttgtggcctgggtcacctctacggctggcccagatccttccctgccgcctccttcaggttccgtcttcctccactcc |
| | construct with | ctcttccccttgctctctgctgtgttgctgcccaaggatgctctttccggagcacttccttctcggcgctgcaccacg |
| | homology arms to | tgatgtcctctgagcggatcctccccgtgtctgggtcctctccgggcatctctcctccctcacccaaccccatgcc |
| | mouse AAVS1 | gtcttcactcgctgggttcccttttccttctccttctggggcctgtgccatctctcgtttcttaggatggccttctccgac |
| | | ggatgtctcccttgcgtcccgcctccccttcttgtaggcctgcatcatcaccgtttttctggacaaccccaaagtacc |
| | | ccgtctccctggctttagccacctctccatcctcttgctttctttgcctggacaccccgttctcctgtggattcgggtc |
| | | acctctcactcctttcatttgggcagctcccctaccccccttacctctctagtctgtgctagctcttccagccccctgt |
| | | catggcatcttccaggggtccgagagctcagctagtcttcttcctccaacccgggcccctatgtccacttcaggac |
| | | agcatgtttgctgcctccagggatcctgtgtccccgagctgggaccaccttatattcccagggccggttaatgtgg |
| | | ctctggttctgggtacttttatctgtcccctccaccccacagtggggccactagggacaggattggtgacagaaaa |
| | | gccccatccttaggcctcctccttcctagtctcctgatattgggtctaacccccacctcctgttaggcagattccttat |
| | | ctggtgacacaccccctagttattaatgagtaattcatacaaaaggactcgcccctgccttggggaatcccaggg |
| | | accgtcgttaaactcccactaacgtagaacccagagatcgctgcgttcccgccccctcacccgcccgcttcgtc |
| | | atcactgaggtggagaagagcatgcgtgaggctccggtgcccgtcagtgggcagagcgcacatcgcccacag |
| | | tccccgagaagttggggggaggggtcggcaattgaaccggtgcctagagaaggtggcgcggggtaaactgg |
| | | gaaagtgatgtcgtgtactggctccgcctttttcccgaggggggggagaaccgtatataagtgcagtagtcgcc |
| | | gtgaacgttctttttcgcaacgggtttgccgccagaacacaggtaagtgccgtgtgtggttcccgcgggcctggc |
| | | ctctttacgggttatggcccttgcgtgccttgaattacttccacgcccctggctgcagtacgtgattcttgatcccga |
| | | gcttcgggttggaagtgggtgggagagttcgaggccttgcgcttaaggagccccttcgcctcgtgcttgagttga |
| | | ggcctggcttgggcgctggggccgccgcgtgcgaatctggtggcaccttcgcgcctgtctcgctgctttcgataa |
| | | gtctctagccatttaaaatttttgatgacctgctgcgacgctttttttctggcaagatagtcttgtaaatgcgggccaa |
| | | Catctgcacactggtatttcggtttttggggccgcgggcggcgacggggcccgtgcgtcccagcgcacatgttc |
| | | ggcgaggcggggcctgcgagcgcggccaccgagaatcggacgggggtagtctcaagctggccggcctgct |
| | | ctggtgcctggcctcgcgccgccgtgtatcgccccgccctgggcggcaaggctggcccggtcggcaccagtt |
| | | gcgtgagcggaaagatggccgcttcccggccctgctgcagggagctcaaaatggaggacgcggcgctcggg |
| | | agagcggggggtgagtcacccacacaaaggaaaagggcctttccgtcctcagccgtcgcttcatgtgactcc |
| | | acggagtaccgggcgccgtccaggcacctcgattagttctcgagcttttggagtacgtcgtctttaggttggggg |
| | | gaggggttttatgcgatggagtttccccacactgagtgggtggagactgaagttaggccagcttggcacttgatgt |
| | | aattctccttggaatttgccctttttgagtttggatcttggttcattctcaagcctcagacagtggttcaaagtttttttctt |
| | | ccatttcaggtgtcgtgacgctagcgctaccggactcaatctcgagctcaagcttcgaattctgcagtcgacggta |
| | | ccgcgggcccgggatccaccggtcgccaccATGgtgAGCAAGGGCGAGGAGCTGTTC |
| | | ACCGGGGTGGTGCCCATCCTGGTCGAGCTGGACGGCGACGTAAACG |
| | | GCCACAAGTTCAGCGTGTCCGGCGAGGGCGAGGGCGATGCCACCTA |
| | | CGGCAAGCTGACCCTGAAGTTCATCTGCACCACCGGCAAGCTGCCC |
| | | GTGCCCTGGCCCACCCTCGTGACCACCCTGACCTACGGCGTGCAGT |
| | | GCTTCAGCCGCTACCCCGACCACATGAAGCAGCACGACTTCTTCAA |
| | | GTCCGCCATGCCCGAAGGCTACGTCCAGGAGCGCACCATCTTCTTC |
| | | AAGGACGACGGCAACTACAAGACCCGCGCCGAGGTGAAGTTCGAG |
| | | GGCGACACCCTGGTGAACCGCATCGAGCTGAAGGGCATCGACTTCA |
| | | AGGAGGACGGCAACATCCTGGGGCACAAGCTGGAGTACAACTACA |
| | | ACAGCCACAACGTCTATATCATGGCCGACAAGCAGAAGAACGGCA |
| | | TCAAGGTGAACTTCAAGATCCGCCACAACATCGAGGACGGCAGCGT |
| | | GCAGCTCGCCGACCACTACCAGCAGAACACCCCCATCGGCGACGGC |
| | | CCCGTGCTGCTGCCCGACAACCACTACCTGAGCACCCAGTCCGCCC |
| | | TGAGCAAAGACCCCAACGAGAAGCGCGATCACATGGTCCTGCTGG |
| | | AGTTCGTGACCGCCGCCGGGATCACTCTCGGCATGGACGAGCTGTA |
| | | CAAGTAAtagcggccgcgactctagatcataatcagccataccacatttgtagaggttttacttgctttaaaa |
| | | aacctcccacacctccccctgaacctgaaacataaaatgaatgcaattgttgttgttaacttgtttattgcagcttata |
| | | atggttacaaataaagcaatagcatcacaaatttcacaaataaagcatttttttcactgcattctagttgtggtttgtcc |
| | | aaactcatcaatgtatcttaaggcgtcggttctcagtggccaccctgcgctaccctctcccagaacctgagctgct |
| | | ctgacgcggccgtctggtgcgtttcactgatcctggtgctgcagcttccttacacttcccaagaggagaagcagtt |
| | | tggaaaaacaaaatcagaataagttggtcctgagttctaactttggctcttcacctttctagtccccaatttatattgttc |
| | | ctccgtgcgtcagttttacctgtgagataaggccagtagccagccccgtcctggcagggctgtggtgaggaggg |
| | | gggtgtccgtgtggaaaactccctttgtgagaatggtgcgtcctaggtgttcaccaggtcgtggccgcctctactc |
| | | cctttctctttctccatccttctttccttaaagagtccccagtgctatctgggacatattcctccgcccagagcagggt |
| | | cccgcttccctaaggccctgctctgggcttctgggtttgagtccttggcaagcccaggagaggcgctcaggcttc |
| | | cctgtcccccttcctcgtccaccatctcatgcccctggctctcctgccccttccctacaggggttcctggctctgctc |
| | | ttcagactgagccccgttcccctgcatccccgttcccctgcatcccccttcccctgcatcccccagaggccccag |
| | | gccacctacttggcctggaccccacgagaggccaccccagccctgtctaccaggctgccttttgggtggattctc |
| | | ctccaactgtggggtgactgcttggcaaactcactcttcggggtatcccaggaggcctggagcattggggtggg |
| | | ctggggttcagagaggagggattcccttctcaggttacgtggccaagaagcaggggagctgggtttgggtcag |
| | | gtctgggtgtggggtgaccagcttatgctgtttgcccaggacagcctagttttagcactgaaac |
| 303 | Template OG | actagtccgcgggcggccgcgctgccctcctctcgcccccgagtgcccttgctgtgccgccggaactctgccct |
| | eGFP insertion | ctaacgctgccgtctctctcctgagtccggaccactttgagctctactggcttctgcgccgcctctggcccactgttt |
| | construct with | ccccttcccaggcaggtcctgctttctctgacctgcattctctcccctgggcctgtgccgctttctgtctgcagcttgt |
| | homology arms to | ggcctgggtcacctctacggctggcccagatccttccctgccgcctccttcaggttccgtcttcctccactccctctt |
| | mouse AAVS1 | ccccttgctctctgctgtgttgctgcccaaggatgctctttccggagcacttccttctcggcgctgcaccacgtgat |
| | | gtcctctgagcggatcctccccgtgtctgggtcctctccgggcatctctcctccctcacccaaccccatgccgtctt |
| | | cactcgctgggttcccttttccttctccttctggggcctgtgccatctctcgtttcttaggatggccttctccgacggat |
| | | gtctcccttgcgtcccgcctccccttcttgtaggcctgcatcatcaccgtttttctggacaaccccaaagtaccccgt |
| | | ctccctggctttagccacctctccatcctcttgctttctttgcctggacaccccgttctcctgtggattcgggtcacctc |
| | | tcactcctttcatttgggcagctcccctaccccccttacctctctagtctgtgctagctcttccagccccctgtcatgg |
| | | catcttccaggggtccgagagctcagctagtcttcttcctccaacccgggcccctatgtccacttcaggacagcat |
| | | gtttgctgcctccagggatcctgtgtccccgagctgggaccaccttatattcccagggccggttaatgtggctctg |
| | | gttctgggtacttttatctgtcccctccaccccacagttagttattaatgagtaattcatacaaaaggactcgcccctg |
| | | ccttggggaatcccagggaccgtcgttaaactcccactaacgtagaacccagagatcgctgcgttcccgccccc |
| | | tcacccgcccgctctcgtcatcactgaggtggagaagagcatgcgtgaggctccggtgcccgtcagtgggcag |
| | | agcgcacatcgcccacagtccccgagaagttggggggaggggtcggcaattgaaccggtgcctagagaaggt |
| | | ggcgcggggtaaactgggaaagtgatgtcgtgtactggctccgcctttttcccgagggtgggggagaaccgtat |
| | | ataagtgcagtagtcgccgtgaacgttctttttcgcaacgggtttgccgccagaacacaggtaagtgccgtgtgtg |
| | | gttcccggggcctggcctctttacgggttatggcccttgcgtgccttgaattacttccacgcccctggctgcagta |
| | | cgtgattcttgatcccgagcttcgggttggaagtgggtgggagagttcgaggccttgcgcttaaggagccccttc |
| | | gcctcgtgcttgagttgaggcctggcttgggcgctggggccgccgcgtgcgaatctggtggcaccttcgcgcct |
| | | gtctcgctgctttcgataagtctctagccatttaaaatttttgatgacctgctgcgacgctttttttctggcaagatagtc |
| | | ttgtaaatgcgggccaacatctgcacactggtatttcggtttttggggccgcgggcggcgacggggcccgtgcg |
| | | tcccagcgcacatgttcggcgaggcggggcctgcgagcgcggccaccgagaatcggacgggggtagtctca |
| | | agctggccggcctgctctggtgcctggcctcgcgccgccgtgtatcgccccgccctgggcggcaaggctggc |
| | | ccggtcggcaccagttgcgtgagcggaaagatggccgcttcccggccctgctgcagggagctcaaaatggag |
| | | gacgcggcgctcgggagagcggggggtgagtcacccacacaaaggaaaagggcctttccgtcctcagccg |
| | | tcgcttcatgtgactccacggagtaccgggcgccgtccaggcacctcgattagttctcgagcttttggagtacgtc |
| | | gtctttaggttggggggaggggttttatgcgatggagtttccccacactgagtgggtggagactgaagttaggcc |
| | | agcttggcacttgatgtaattctccttggaatttgccctttttgagtttggatcttggttcattctcaagcctcagacagt |
| | | ggttcaaagtttttttcttccatttcaggtgtcgtgacaccggtcgccaccatggtgAGCAAGGGCGAG |
| | | GAGCTGTTCACCGGGGTGGTGCCCATCCTGGTCGAGCTGGACGGCG |
| | | ACGTAAACGGCCACAAGTTCAGCGTGTCCGGCGAGGGCGAGGGCG |
| | | ATGCCACCTACGGCAAGCTGACCCTGAAGTTCATCTGCACCACCGG |
| | | CAAGCTGCCCGTGCCCTGGCCCACCCTCGTGACCACCCTGACCTAC |
| | | GGCGTGCAGTGCTTCAGCCGCTACCCCGACCACATGAAGCAGCACG |
| | | ACTTCTTCAAGTCCGCCATGCCCGAAGGCTACGTCCAGGAGCGCAC |
| | | CATCTTCTTCAAGGACGACGGCAACTACAAGACCCGCGCCGAGGTG |
| | | AAGTTCGAGGGCGACACCCTGGTGAACCGCATCGAGCTGAAGGGC |
| | | ATCGACTTCAAGGAGGACGGCAACATCCTGGGGCACAAGCTGGAG |
| | | TACAACTACAACAGCCACAACGTCTATATCATGGCCGACAAGCAGA |
| | | AGAACGGCATCAAGGTGAACTTCAAGATCCGCCACAACATCGAGG |
| | | ACGGCAGCGTGCAGCTCGCCGACCACTACCAGCAGAACACCCCCAT |
| | | CGGCGACGGCCCCGTGCTGCTGCCCGACAACCACTACCTGAGCACC |
| | | CAGTCCGCCCTGAGCAAAGACCCCAACGAGAAGCGCGATCACATG |
| | | GTCCTGCTGGAGTTCGTGACCGCCGCCGGGATCACTCTCGGCATGG |
| | | ACGAGCTGTACAAGtaatagcggccgcgactctagatcataatcagccataccacatttgtagaggt |
| | | tttacttgctttaaaaaacctcccacacctccccctgaacctgaaacataaaatgaatgcaattgttgttgttaacttgt |
| | | ttattgcagcttataatggttacaaataaagcaatagcatcacaaatttcacaaataaagcatttttttcactgcattcta |
| | | gttgtggtttgtccaaactcatcaatgtatcttaaggcgttttcctggagccatctctctccttgccagaacctctaag |
| | | gtttgcttacgatggagccagagaggatcctgggagggagagcttggcaggggggggagggaaggggggg |
| | | atgcgtgacctgcccggttctcagtggccaccctgcgctaccctctcccagaacctgagctgctctgacgcggc |
| | | cgtctggtgcgtttcactgatcctggtgctgcagcttccttacacttcccaagaggagaagcagtttggaaaaaca |
| | | aaatcagaataagttggtcctgagttctaactttggctcttcacctttctagtccccaatttatattgttcctccgtgcgt |
| | | cagttttacctgtgagataaggccagtagccagccccgtcctggcagggctgtggtgaggaggggggtgtccgt |
| | | gtggaaaactccctttgtgagaatggtgcgtcctaggtgttcaccaggtcgtggccgcctctactccctttctctttct |
| | | ccatccttctttccttaaagagtccccagtgctatctgggacatattcctccgcccagagcagggtcccgcttccct |
| | | aaggccctgctctgggcttctgggtttgagtccttggcaagcccaggagaggcgctcaggcttccctgtccccct |
| | | tcctcgtccaccatctcatgcccctggctctcctgccccttccctacaggggttcctggctctgctcttcagactgag |
| | | ccccgttcccctgcatccccgttcccctgcatcccccttcccctgcatcccccagaggccccaggccacctactt |
| | | ggcctggaccccacgagaggccaccccagccctgtctaccaggctgccttttgggggattctcctccaactgtg |
| | | gggtgactgcttggcaaactcactcttcggggtatcccaggaggcctggagcattggggtgggctggggttcag |
| | | aggcggccgcccgcggactagt |
| 304 | Bidirectional | TTGGCCACTCCCTCTCTGCGCGCTCGCTCGCTCACTGAGGCCGGGCG |
| | NanoLuc | ACCAAAGGTCGCCCGACGCCCGGGCTTTGCCCGGGCGGCCTCAGTG |
| | insertion | AGCGAGCGAGCGCGCAGAGAGGGAGTGGCCAACTCCATCACTAGG |
| | Construct | GGTTCCTagatctctATAACTTCGTATAGCATACATTATACGAAGTTATA |
| | | TGTATGCtaggtcagtgaagagaagaacaaaaagcagcatattacagttagttgtcttcatcaatctttaaat |
| | | atgttgtgtggtttttctctccctgtttccacagtttttcttgatcatgaaaacgccaacaaaattctgaatcggccaaa |
| | | gaggtataattcaggtaaattggaagagtttgttcaagggaaccttgagagagaatgtatggaagaaaagtgtagt |
| | | tttgaagaagcaGTATTCACTTTGGAGGACTTTGTCGGTGACTGGAGGCAA |
| | | ACCGCTGGTTATAATCTCGACCAaGTACTGGAACAGGGCGGGGTAA |
| | | GTTCCCTCTTTCAGAATTTGGGTGTAAGCGTCACACCAATCCAGCGG |
| | | ATTGTGTTGTCTGGAGAGAACGGACTCAAAATTGACATCCATGTTA |
| | | TCATTCCATATGAAGGTCTCAGTGGAGACCAAATGGGGCAGATCGA |
| | | GAAGATTTTCAAGGTAGTTTACCCAGTCGACGATCACCACTTCAAA |
| | | GTCATtCTCCACTATGGCACACTTGTTATCGACGGAGTAACTCCTAA |
| | | TATGATTGATTACTTTGGTCGCCCGTATGAGGGCATCGCAGTGTTTG |
| | | ATGGCAAAAAGATCACCGTAACAGGAACGTTGTGGAATGGGAACA |
| | | AGATAATCGACGAGAGATTGATAAATCCAGACGGGTCACTCCTGTT |
| | | CAGGGTTACAATTAACGGCGTCACAGGATGGAGACTCTGTGAACGA |
| | | ATACTGGCCacaaatttttcactcctgaagcaggccggagacgtggaggaaaacccagggcccgtgA |
| | | GCAAGGGCGAGGAGCTGTTCACCGGGGTGGTGCCCATCCTGGTCGA |
| | | GCTGGACGGCGACGTAAACGGCCACAAGTTCAGCGTGTCCGGCGA |
| | | GGGCGAGGGCGATGCCACCTACGGCAAGCTGACCCTGAAGTTCATC |
| | | TGCACCACCGGCAAGCTGCCCGTGCCCTGGCCCACCCTCGTGACCA |
| | | CCCTGACCTACGGCGTGCAGTGCTTCAGCCGCTACCCCGACCACAT |
| | | GAAGCAGCACGACTTCTTCAAGTCCGCCATGCCCGAAGGCTACGTC |
| | | CAGGAGCGCACCATCTTCTTCAAGGACGACGGCAACTACAAGACCC |
| | | GCGCCGAGGTGAAGTTCGAGGGCGACACCCTGGTGAACCGCATCG |
| | | AGCTGAAGGGCATCGACTTCAAGGAGGACGGCAACATCCTGGGGC |
| | | ACAAGCTGGAGTACAACTACAACAGCCACAACGTCTATATCATGGC |
| | | CGACAAGCAGAAGAACGGCATCAAGGTGAACTTCAAGATCCGCCA |
| | | CAACATCGAGGACGGCAGCGTGCAGCTCGCCGACCACTACCAGCA |
| | | GAACACCCCCATCGGCGACGGCCCCGTGCTGCTGCCCGACAACCAC |
| | | TACCTGAGCACCCAGTCCGCCCTGAGCAAAGACCCCAACGAGAAGC |
| | | GCGATCACATGGTCCTGCTGGAGTTCGTGACCGCCGCCGGGATCAC |
| | | TCTCGGCATGGACGAGCTGTACAAGGGAGGAGGAAGCCCGAAGAA |
| | | GAAGAGAAAGGTCTAAcctCGACTGTGCCTTCTAGTTGCCAGCCATC |
| | | TGTTGTTTGCCCCTCCCCCGTGCCTTCCTTGACCCTGGAAGGTGCCA |
| | | CTCCCACTGTCCTTTCCTAATAAAATGAGGAAATTGCATCGCATTGT |
| | | CTGAGTAGGTGTCATTCTATTCTGGGGGGTGGGGTGGGGCAGGACA |
| | | GCAAGGGGGAGGATTGGGAAGACAATAGCAGGCATGCTGGGGATG |
| | | CGGTGGGCTCTATGGcttctgaggcggaaagaaccagctggggctctagggggtatccccAA |
| | | AAAACCTCCCACACCTCCCCCTGAACCTGAAACATAAAATGAATGC |
| | | AATTGTTGTTGTTAACTTGTTTATTGCAGCTTATAATGGTTACAAAT |
| | | AAAGCAATAGCATCACAAATTTCACAAATAAAGCATTTTTTTCACT |
| | | GCATTCTAGTTGTGGTTTGTCCAAACTCATCAATGTATCTTATCATG |
| | | TCTGTTACACCTTCCTCTTCTTCTTGGGGCTGCCGCCGCCCTTGTACA |
| | | GCTCGTCCATGCCCAGGGTGATGCCGGCGGCGGTCACGAACTCCAG |
| | | CAGCACCATGTGGTCCCTCTTCTCGTTGGGGTCCTTGCTCAGGGCGC |
| | | TCTGGGTGCTCAGGTAGTGGTTGTCGGGCAGCAGCACGGGGCCGTC |
| | | GCCGATGGGGGTGTTCTGCTGGTAGTGGTCGGCCAGCTGCACGCTG |
| | | CCGTCCTCGATGTTGTGCCTGATCTTGAAGTTCACCTTGATGCCGTT |
| | | CTTCTGCTTGTCGGCCATGATGTACACGTTGTGGCTGTTGTAGTTGT |
| | | ACTCCAGCTTGTGGCCCAGGATGTTGCCGTCCTCCTTGAAGTCGATG |
| | | CCCTTCAGCTCGATCCTGTTCACCAGGGTGTCGCCCTCGAACTTCAC |
| | | CTCGGCCCTGGTCTTGTAGTTGCCGTCGTCCTTGAAGAAGATGGTCC |
| | | TCTCCTGCACGTAGCCCTCGGGCATGGCGCTCTTGAAGAAGTCGTG |
| | | CTGCTTCATGTGGTCGGGGTACCTGCTGAAGCACTGCACGCCGTAG |
| | | GTCAGGGTGGTCACCAGGGTGGGCCAGGGCACGGGCAGCTTGCCG |
| | | GTGGTGCAGATGAACTTCAGGGTCAGCTTGCCGTAGGTGGCGTCGC |
| | | CCTCGCCCTCGCCGCTCACGCTGAACTTGTGGCCGTTCACGTCGCCG |
| | | TCCAGCTCCACCAGGATGGGCACCACGCCGGTGAACAGCTCCTCGC |
| | | CCTTGCTCACGGGGCCGGGGTTCTCCTCCACGTCGCCGGCCTGCTTC |
| | | AGCAGGCTGAAGTTGGTGGCCAGGATCCTCTCGCACAGCCTCCAGC |
| | | CGGTCACGCCGTTGATGGTCACCCTGAACAGCAGGCTGCCGTCGGG |
| | | GTTGATCAGCCTCTCGTCGATGATCTTGTTGCCGTTCCACAGGGTGC |
| | | CGGTCACGGTGATCTTCTTGCCGTCGAACACGGCGATGCCCTCGTA |
| | | GGGCCTGCCGAAGTAGTCGATCATGTTGGGGGTCACGCCGTCGATC |
| | | ACCAGGGTGCCGTAGTGCAGGATCACCTTGAAGTGGTGGTCGTCCA |
| | | CGGGGTACACCACCTTGAAAATCTTCTCGATCTGGCCCATCTGGTCG |
| | | CCGCTCAGGCCCTCGTAGGGGATGATCACGTGGATGTCGATCTTCA |
| | | GGCCGTTCTCGCCGCTCAGCACGATCCTCTGGATGGGGGTCACGCT |
| | | CACGCCCAGGTTCTGGAACAGGCTGCTCACGCCGCCCTGCTCCAGC |
| | | ACCTGGTCCAGGTTGTAGCCGGCGGTCTGCCTCCAGTCGCCCACGA |
| | | AGTCCTCCAGGGTGAACACGGCCTCCTCGAAGCTGCACTTCTCCTCC |
| | | ATGCACTCCCTCTCCAGGTTGCCCTGCACGAACTCCTCCAGCTTGCC |
| | | GCTGTTGTACCTCTTGGGCCTGTTCAGGATCTTGTTGGCGTTCTCGT |
| | | GGTCCAGGAAaactgtggaaacagggagagaaaaaccacacaacatatttaaagattgatgaagaca |
| | | actaactgtaatatgctgctttttgttcttctcttcactgacctaATGTATGCATAACTTCGTATAG |
| | | CATACATTATACGAAGTTATagagatctAGGAACCCCTAGTGATGGAGT |
| | | TGGCCACTCCCTCTCTGCGCGCTCGCTCGCTCACTGAGGCCGCCCGG |
| | | GCAAAGCCCGGGCGTCGGGCGACCTTTGGTCGCCCGGCCTCAGTGA |
| | | GCGAGCGAGCGCGCAGAGAGGGAGTGGCCAA |
| 305 | Open reading | AUGGAGGCCUCCCCCGCCUCCGGCCCCCGGCACCUGAUGGACCCC |
| | frame for Nme2 | CACAUCUUCACCUCCAACUUCAACAACGGCAUCGGCCGGCACAAG |
| | Cas9 | ACCUACCUGUGCUACGAGGUGGAGCGGCUGGACAACGGCACCUCC |
| | | GUGAAGAUGGACCAGCACCGGGGCUUCCUGCACAACCAGGCCAAG |
| | | AACCUGCUGUGCGGCUUCUACGGCCGGCACGCCGAGCUGCGGUUC |
| | | CUGGACCUGGUGCCCUCCCUGCAGCUGGACCCCGCCCAGAUCUAC |
| | | CGGGUGACCUGGUUCAUCUCCUGGUCCCCCUGCUUCUCCUGGGGC |
| | | UGCGCCGGCGAGGUGCGGGCCUUCCUGCAGGAGAACACCCACGUG |
| | | CGGCUGCGGAUCUUCGCCGCCCGGAUCUACGACUACGACCCCCUG |
| | | UACAAGGAGGCCCUGCAGAUGCUGCGGGACGCCGGCGCCCAGGUG |
| | | UCCAUCAUGACCUACGACGAGUUCAAGCACUGCUGGGACACCUUC |
| | | GUGGACCACCAGGGCUGCCCCUUCCAGCCCUGGGACGGCCUGGAC |
| | | GAGCACUCCCAGGCCCUGUCCGGCCGGCUGCGGGCCAUCCUGCAG |
| | | AACCAGGGCAACUCCGGCUCCGAGACCCCCGGCACCUCCGAGUCC |
| | | GCCACCCCCGAGUCCGACAAGAAGUACUCCAUCGGCCUGGCCAUC |
| | | GGCACCAACUCCGUGGGCUGGGCCGUGAUCACCGACGAGUACAAG |
| | | GUGCCCUCCAAGAAGUUCAAGGUGCUGGGCAACACCGACCGGCAC |
| | | UCCAUCAAGAAGAACCUGAUCGGCGCCCUGCUGUUCGACUCCGGC |
| | | GAGACCGCCGAGGCCACCCGGCUGAAGCGGACCGCCCGGCGGCGG |
| | | UACACCCGGCGGAAGAACCGGAUCUGCUACCUGCAGGAGAUCUUC |
| | | UCCAACGAGAUGGCCAAGGUGGACGACUCCUUCUUCCACCGGCUG |
| | | GAGGAGUCCUUCCUGGUGGAGGAGGACAAGAAGCACGAGCGGCA |
| | | CCCCAUCUUCGGCAACAUCGUGGACGAGGUGGCCUACCACGAGAA |
| | | GUACCCCACCAUCUACCACCUGCGGAAGAAGCUGGUGGACUCCAC |
| | | CGACAAGGCCGACCUGCGGCUGAUCUACCUGGCCCUGGCCCACAU |
| | | GAUCAAGUUCCGGGGCCACUUCCUGAUCGAGGGCGACCUGAACCC |
| | | CGACAACUCCGACGUGGACAAGCUGUUCAUCCAGCUGGUGCAGAC |
| | | CUACAACCAGCUGUUCGAGGAGAACCCCAUCAACGCCUCCGGCGU |
| | | GGACGCCAAGGCCAUCCUGUCCGCCCGGCUGUCCAAGUCCCGGCG |
| | | GCUGGAGAACCUGAUCGCCCAGCUGCCCGGCGAGAAGAAGAACGG |
| | | CCUGUUCGGCAACCUGAUCGCCCUGUCCCUGGGCCUGACCCCCAA |
| | | CUUCAAGUCCAACUUCGACCUGGCCGAGGACGCCAAGCUGCAGCU |
| | | GUCCAAGGACACCUACGACGACGACCUGGACAACCUGCUGGCCCA |
| | | GAUCGGCGACCAGUACGCCGACCUGUUCCUGGCCGCCAAGAACCU |
| | | GUCCGACGCCAUCCUGCUGUCCGACAUCCUGCGGGUGAACACCGA |
| | | GAUCACCAAGGCCCCCCUGUCCGCCUCCAUGAUCAAGCGGUACGA |
| | | CGAGCACCACCAGGACCUGACCCUGCUGAAGGCCCUGGUGCGGCA |
| | | GCAGCUGCCCGAGAAGUACAAGGAGAUCUUCUUCGACCAGUCCAA |
| | | GAACGGCUACGCCGGCUACAUCGACGGCGGCGCCUCCCAGGAGGA |
| | | GUUCUACAAGUUCAUCAAGCCCAUCCUGGAGAAGAUGGACGGCA |
| | | CCGAGGAGCUGCUGGUGAAGCUGAACCGGGAGGACCUGCUGCGG |
| | | AAGCAGCGGACCUUCGACAACGGCUCCAUCCCCCACCAGAUCCAC |
| | | CUGGGCGAGCUGCACGCCAUCCUGCGGCGGCAGGAGGACUUCUAC |
| | | CCCUUCCUGAAGGACAACCGGGAGAAGAUCGAGAAGAUCCUGACC |
| | | UUCCGGAUCCCCUACUACGUGGGCCCCCUGGCCCGGGGCAACUCC |
| | | CGGUUCGCCUGGAUGACCCGGAAGUCCGAGGAGACCAUCACCCCC |
| | | UGGAACUUCGAGGAGGUGGUGGACAAGGGCGCCUCCGCCCAGUCC |
| | | UUCAUCGAGCGGAUGACCAACUUCGACAAGAACCUGCCCAACGAG |
| | | AAGGUGCUGCCCAAGCACUCCCUGCUGUACGAGUACUUCACCGUG |
| | | UACAACGAGCUGACCAAGGUGAAGUACGUGACCGAGGGCAUGCG |
| | | GAAGCCCGCCUUCCUGUCCGGCGAGCAGAAGAAGGCCAUCGUGGA |
| | | CCUGCUGUUCAAGACCAACCGGAAGGUGACCGUGAAGCAGCUGA |
| | | AGGAGGACUACUUCAAGAAGAUCGAGUGCUUCGACUCCGUGGAG |
| | | AUCUCCGGCGUGGAGGACCGGUUCAACGCCUCCCUGGGCACCUAC |
| | | CACGACCUGCUGAAGAUCAUCAAGGACAAGGACUUCCUGGACAAC |
| | | GAGGAGAACGAGGACAUCCUGGAGGACAUCGUGCUGACCCUGAC |
| | | CCUGUUCGAGGACCGGGAGAUGAUCGAGGAGCGGCUGAAGACCU |
| | | ACGCCCACCUGUUCGACGACAAGGUGAUGAAGCAGCUGAAGCGGC |
| | | GGCGGUACACCGGCUGGGGCCGGCUGUCCCGGAAGCUGAUCAACG |
| | | GCAUCCGGGACAAGCAGUCCGGCAAGACCAUCCUGGACUUCCUGA |
| | | AGUCCGACGGCUUCGCCAACCGGAACUUCAUGCAGCUGAUCCACG |
| | | ACGACUCCCUGACCUUCAAGGAGGACAUCCAGAAGGCCCAGGUGU |
| | | CCGGCCAGGGCGACUCCCUGCACGAGCACAUCGCCAACCUGGCCG |
| | | GCUCCCCCGCCAUCAAGAAGGGCAUCCUGCAGACCGUGAAGGUGG |
| | | UGGACGAGCUGGUGAAGGUGAUGGGCCGGCACAAGCCCGAGAAC |
| | | AUCGUGAUCGAGAUGGCCCGGGAGAACCAGACCACCCAGAAGGGC |
| | | CAGAAGAACUCCCGGGAGCGGAUGAAGCGGAUCGAGGAGGGCAU |
| | | CAAGGAGCUGGGCUCCCAGAUCCUGAAGGAGCACCCCGUGGAGAA |
| | | CACCCAGCUGCAGAACGAGAAGCUGUACCUGUACUACCUGCAGAA |
| | | CGGCCGGGACAUGUACGUGGACCAGGAGCUGGACAUCAACCGGCU |
| | | GUCCGACUACGACGUGGACCACAUCGUGCCCCAGUCCUUCCUGAA |
| | | GGACGACUCCAUCGACAACAAGGUGCUGACCCGGUCCGACAAGAA |
| | | CCGGGGCAAGUCCGACAACGUGCCCUCCGAGGAGGUGGUGAAGA |
| | | AGAUGAAGAACUACUGGCGGCAGCUGCUGAACGCCAAGCUGAUC |
| | | ACCCAGCGGAAGUUCGACAACCUGACCAAGGCCGAGCGGGGCGGC |
| | | CUGUCCGAGCUGGACAAGGCCGGCUUCAUCAAGCGGCAGCUGGUG |
| | | GAGACCCGGCAGAUCACCAAGCACGUGGCCCAGAUCCUGGACUCC |
| | | CGGAUGAACACCAAGUACGACGAGAACGACAAGCUGAUCCGGGA |
| | | GGUGAAGGUGAUCACCCUGAAGUCCAAGCUGGUGUCCGACUUCC |
| | | GGAAGGACUUCCAGUUCUACAAGGUGCGGGAGAUCAACAACUAC |
| | | CACCACGCCCACGACGCCUACCUGAACGCCGUGGUGGGCACCGCC |
| | | CUGAUCAAGAAGUACCCCAAGCUGGAGUCCGAGUUCGUGUACGG |
| | | CGACUACAAGGUGUACGACGUGCGGAAGAUGAUCGCCAAGUCCG |
| | | AGCAGGAGAUCGGCAAGGCCACCGCCAAGUACUUCUUCUACUCCA |
| | | ACAUCAUGAACUUCUUCAAGACCGAGAUCACCCUGGCCAACGGCG |
| | | AGAUCCGGAAGCGGCCCCUGAUCGAGACCAACGGCGAGACCGGCG |
| | | AGAUCGUGUGGGACAAGGGCCGGGACUUCGCCACCGUGCGGAAG |
| | | GUGCUGUCCAUGCCCCAGGUGAACAUCGUGAAGAAGACCGAGGU |
| | | GCAGACCGGCGGCUUCUCCAAGGAGUCCAUCCUGCCCAAGCGGAA |
| | | CUCCGACAAGCUGAUCGCCCGGAAGAAGGACUGGGACCCCAAGAA |
| | | GUACGGCGGCUUCGACUCCCCCACCGUGGCCUACUCCGUGCUGGU |
| | | GGUGGCCAAGGUGGAGAAGGGCAAGUCCAAGAAGCUGAAGUCCG |
| | | UGAAGGAGCUGCUGGGCAUCACCAUCAUGGAGCGGUCCUCCUUCG |
| | | AGAAGAACCCCAUCGACUUCCUGGAGGCCAAGGGCUACAAGGAG |
| | | GUGAAGAAGGACCUGAUCAUCAAGCUGCCCAAGUACUCCCUGUUC |
| | | GAGCUGGAGAACGGCCGGAAGCGGAUGCUGGCCUCCGCCGGCGAG |
| | | CUGCAGAAGGGCAACGAGCUGGCCCUGCCCUCCAAGUACGUGAAC |
| | | UUCCUGUACCUGGCCUCCCACUACGAGAAGCUGAAGGGCUCCCCC |
| | | GAGGACAACGAGCAGAAGCAGCUGUUCGUGGAGCAGCACAAGCA |
| | | CUACCUGGACGAGAUCAUCGAGCAGAUCUCCGAGUUCUCCAAGCG |
| | | GGUGAUCCUGGCCGACGCCAACCUGGACAAGGUGCUGUCCGCCUA |
| | | CAACAAGCACCGGGACAAGCCCAUCCGGGAGCAGGCCGAGAACAU |
| | | CAUCCACCUGUUCACCCUGACCAACCUGGGCGCCCCCGCCGCCUU |
| | | CAAGUACUUCGACACCACCAUCGACCGGAAGCGGUACACCUCCAC |
| | | CAAGGAGGUGCUGGACGCCACCCUGAUCCACCAGUCCAUCACCGG |
| | | CCUGUACGAGACCCGGAUCGACCUGUCCCAGCUGGGCGGCGACGG |
| | | CGGCGGCUCCCCCAAGAAGAAGCGGAAGGUGUGA |
| 306 | Open reading | ATGgaggccTcccccgccTccggcccccggcaccTgaTggacccccacaTcTTcaccTccAAC |
| | frame for Sp. | TTCAACAACggcATCggccggCACAAGaccTACCTGTGCTACgaggTggagcg |
| | BC22n base | gCTGGACAACggcaccTccgTgAAGATGGACCAGCACcggggcTTCCTGCA |
| | editor | CAACCAGgccAAGAACCTGCTGTGCggcTTCTACggccggCACgccgagCTG |
| | | cggTTCCTGGACCTGgTgcccTccCTGCAGCTGGACcccgccCAGATCTACc |
| | | gggTgaccTGGTTCATCTccTGGTcccccTGCTTCTccTGGggcTGCgccggcgag |
| | | gTgcgggccTTCCTGCAGgagAACaccCACgTgcggCTGcggATCTTCgccgcccg |
| | | gATCTACGACTACGACcccCTGTACAAGgaggccCTGCAGATGCTGcggG |
| | | ACgccggcgccCAGgTgTccATCATGaccTACGACgagTTCAAGCACTGCTG |
| | | GGACaccTTCgTgGACCACCAGggcTGCcccTTCCAGcccTGGGACggcCTG |
| | | GACgagCACTccCAGgccCTGTccggccggCTGcgggccATCCTGCAGAACCA |
| | | GggcAACTccggcTccgagacccccggcaccTccgagTccgccacccccgagTccgacaagaagT |
| | | acTccaTcggccTggCcaTcggcaccaacTccgTgggcTgggccgTgaTcaccgacgagTacaag |
| | | gTgcccTccaagaagTTcaaggTgcTgggcaacaccgaccggcacTccaTcaagaagaaccTgaT |
| | | cggcgcccTgcTgTTcgacTccggcgagaccgccgaggccacccggcTgaagcggaccgcccggcg |
| | | gcggTacacccggcggaagaaccggaTcTgcTaccTgcaggagaTcTTcTccaacgagaTggcca |
| | | aggTggacgacTccTTcTTccaccggcTggaggagTccTTccTggTggaggaggacaagaagca |
| | | cgagcggcaccccaTcTTcggcaacaTcgTggacgaggTggccTaccacgagaagTaccccaccaT |
| | | cTaccaccTgcggaagaagcTggTggacTccaccgacaaggccgaccTgcggcTgaTcTaccTgg |
| | | cccTggcccacaTgaTcaagTTccggggccacTTccTgaTcgagggcgaccTgaaccccgacaac |
| | | TccgacgTggacaagcTgTTcaTccagcTggTgcagaccTacaaccagcTgTTcgaggagaaccc |
| | | caTcaacgccTccggcgTggacgccaaggccaTccTgTccgcccggcTgTccaagTcccggggc |
| | | TggagaaccTgaTcgcccagcTgcccggcgagaagaagaacggccTgTTcggcaaccTgaTcgcc |
| | | cTgTcccTgggccTgacccccaacTTcaagTccaacTTcgaccTggccgaggacgccaagcTgca |
| | | gcTgTccaaggacaccTacgacgacgaccTggacaaccTgcTggcccagaTcggcgaccagTacgc |
| | | cgaccTgTTccTggccgccaagaaccTgTccgacgccaTccTgcTgTccgacaTccTgcgggTg |
| | | aacaccgagaTcaccaaggccccccTgTccgccTccaTgaTcaagcggTacgacgagcaccaccagg |
| | | accTgacccTgcTgaaggcccTggTgcggcagcagcTgcccgagaagTacaaggagaTcTTcTT |
| | | cgaccagTccaagaacggcTacgccggcTacaTcgacggcggcgccTcccaggaggagTTcTacaa |
| | | gTTcaTcaagcccaTccTggagaagaTggacggcaccgaggagcTgcTggTgaagcTgaaccggg |
| | | aggaccTgcTgcggaagcagcggaccTTcgacaacggcTccaTcccccaccagaTccaccTgggg |
| | | agcTgcacgccaTccTgcggcggcaggaggacTTcTaccccTTccTgaaggacaaccgggagaag |
| | | aTcgagaagaTccTgaccTTccggaTccccTacTacgTgggcccccTggcccggggcaacTcccg |
| | | gTTcgccTggaTgacccggaagTccgaggagaccaTcacccccTggaacTTcgaggaggTggTg |
| | | gacaagggcgccTccgcccagTccTTcaTcgagcggaTgaccaacTTcgacaagaaccTgcccaac |
| | | gagaaggTgcTgcccaagcacTcccTgcTgTacgagTacTTcaccgTgTacaacgagcTgaccaa |
| | | ggTgaagTacgTgaccgagggcaTgcggaagcccgccTTccTgTccggcgagcagaagaaggcca |
| | | TcgTggaccTgcTgTTcaagaccaaccggaaggTgaccgTgaagcagcTgaaggaggacTacTT |
| | | caagaagaTcgagTgcTTcgacTccgTggagaTcTccggcgTggaggaccggTTcaacgccTcc |
| | | cTgggcaccTaccacgaccTgcTgaagaTcaTcaaggacaaggacTTccTggacaacgaggagaac |
| | | gaggacaTccTggaggacaTcgTgcTgacccTgacccTgTTcgaggaccgggagaTgaTcgagg |
| | | agcggcTgaagaccTacgcccaccTgTTcgacgacaaggTgaTgaagcagcTgaagcggcggcgg |
| | | TacaccggcTggggccggcTgTcccggaagcTgaTcaacggcaTccgggacaagcagTccggcaa |
| | | gaccaTccTggacTTccTgaagTccgacggcTTcgccaaccggaacTTcaTgcagcTgaTccac |
| | | gacgacTcccTgaccTTcaaggaggacaTccagaaggcccaggTgTccggccagggcgacTcccT |
| | | gcacgagcacaTcgccaaccTggccggcTcccccgccaTcaagaagggcaTccTgcagaccgTgaa |
| | | ggTggTggacgagcTggTgaaggTgaTgggccggcacaagcccgagaacaTcgTgaTcgagaTg |
| | | gcccgggagaaccagaccacccagaagggccagaagaacTcccgggagcggaTgaagcggaTcgagg |
| | | agggcaTcaaggagcTgggcTcccagaTccTgaaggagcaccccgTggagaacacccagcTgcaga |
| | | acgagaagcTgTaccTgTacTaccTgcagaacggccgggacaTgTacgTggaccaggagcTggac |
| | | aTcaaccggcTgTccgacTacgacgTggaccacaTcgTgccccagTccTTccTgaaggacgacTc |
| | | caTcgacaacaaggTgcTgacccggTccgacaagaaccggggcaagTccgacaacgTgcccTccga |
| | | ggaggTggTgaagaagaTgaagaacTacTggcggcagcTgcTgaacgccaagcTgaTcacccagc |
| | | ggaagTTcgacaaccTgaccaaggccgagcggggggccTgTccgagcTggacaaggccggcTTc |
| | | aTcaagcggcagcTggTggagacccggcagaTcaccaagcacgTggcccagaTccTggacTcccgg |
| | | aTgaacaccaagTacgacgagaacgacaagcTgaTccgggaggTgaaggTgaTcacccTgaagTc |
| | | caagcTggTgTccgacTTccggaaggacTTccagTTcTacaaggTgcgggagaTcaacaacTac |
| | | caccacgcccacgacgccTaccTgaacgccgTggTgggcaccgcccTgaTcaagaagTaccccaagc |
| | | TggagTccgagTTcgTgTacggcgacTacaaggTgTacgacgTgcggaagaTgaTcgccaagTc |
| | | cgagcaggagaTcggcaaggccaccgccaagTacTTcTTcTacTccaacaTcaTgaacTTcTTc |
| | | aagaccgagaTcacccTggccaacggcgagaTccggaagcggccccTgaTcgagaccaacggcgaga |
| | | ccggcgagaTcgTgTgggacaagggccgggacTTcgccaccgTgcggaaggTgcTgTccaTgcc |
| | | ccaggTgaacaTcgTgaagaagaccgaggTgcagaccggggcTTcTccaaggagTccaTccTgc |
| | | ccaagcggaacTccgacaagcTgaTcgcccggaagaaggacTgggaccccaagaagTacggcggcT |
| | | TcgacTcccccaccgTggccTacTccgTgcTggTggTggccaaggTggagaagggcaagTccaa |
| | | gaagcTgaagTccgTgaaggagcTgcTgggcaTcaccaTcaTggagcggTccTccTTcgagaag |
| | | aaccccaTcgacTTccTggaggccaagggcTacaaggaggTgaagaaggaccTgaTcaTcaagcT |
| | | gcccaagTacTcccTgTTcgagcTggagaacggccggaagcggaTgcTggccTccgccggcgagc |
| | | TgcagaagggcaacgagcTggcccTgcccTccaagTacgTgaacTTccTgTaccTggccTcccac |
| | | TacgagaagcTgaagggcTcccccgaggacaacgagcagaagcagcTgTTcgTggagcagcacaag |
| | | cacTaccTggacgagaTcaTcgagcagaTcTccgagTTcTccaagcgggTgaTccTggccgacg |
| | | ccaaccTggacaaggTgcTgTccgccTacaacaagcaccgggacaagcccaTccgggagcaggccga |
| | | gaacaTcaTccaccTgTTcacccTgaccaaccTgggcgcccccgccgccTTcaagTacTTcgaca |
| | | ccaccaTcgaccggaagcggTacaccTccaccaaggaggTgcTggacgccacccTgaTccaccagT |
| | | ccaTcaccggccTgTacgagacccggaTcgaccTgTcccagcTgggcggcgacggcggcggcTcc |
| | | cccaagaagaagcggaaggTgTgA |
| 307 | Open reading | aTggacaagaagTacTccaTcggccTggacaTcggcaccaacTccgTgggcTgggccgTgaTcac |
| | frame for Sp. | cgacgagTacaaggTgcccTccaagaagTTcaaggTgcTgggcaacaccgaccggcacTccaTcaa |
| | Cas9 | gaagaaccTgaTcggcgcccTgcTgTTcgacTccggcgagaccgccgaggccacccggcTgaagc |
| | | ggaccgcccggcggcggTacacccggcggaagaaccggaTcTgcTaccTgcaggagaTcTTcTcc |
| | | aacgagaTggccaaggTggacgacTccTTcTTccaccggcTggaggagTccTTccTggTggagg |
| | | aggacaagaagcacgagcggcaccccaTcTTcggcaacaTcgTggacgaggTggccTaccacgaga |
| | | agTaccccaccaTcTaccaccTgcggaagaagcTggTggacTccaccgacaaggccgaccTgcggc |
| | | TgaTcTaccTggcccTggcccacaTgaTcaagTTccggggccacTTccTgaTcgagggcgaccT |
| | | gaaccccgacaacTccgacgTggacaagcTgTTcaTccagcTggTgcagaccTacaaccagcTgT |
| | | TcgaggagaaccccaTcaacgccTccggcgTggacgccaaggccaTccTgTccgcccggcTgTcca |
| | | agTcccggcggcTggagaaccTgaTcgcccagcTgcccggcgagaagaagaacggccTgTTcggc |
| | | aaccTgaTcgcccTgTcccTgggccTgacccccaacTTcaagTccaacTTcgaccTggccgagga |
| | | cgccaagcTgcagcTgTccaaggacaccTacgacgacgaccTggacaaccTgcTggcccagaTcgg |
| | | cgaccagTacgccgaccTgTTccTggccgccaagaaccTgTccgacgccaTccTgcTgTccgaca |
| | | TccTgcgggTgaacaccgagaTcaccaaggccccccTgTccgccTccaTgaTcaagcggTacgac |
| | | gagcaccaccaggaccTgacccTgcTgaaggcccTggTgcggcagcagcTgcccgagaagTacaag |
| | | gagaTcTTcTTcgaccagTccaagaacggcTacgccggcTacaTcgacggcggcgccTcccagga |
| | | ggagTTcTacaagTTcaTcaagcccaTccTggagaagaTggacggcaccgaggagcTgcTggTg |
| | | aagcTgaaccgggaggaccTgcTgcggaagcagcggaccTTcgacaacggcTccaTcccccaccag |
| | | aTccaccTgggcgagcTgcacgccaTccTgcggcggcaggaggacTTcTaccccTTccTgaagga |
| | | caaccgggagaagaTcgagaagaTccTgaccTTccggaTccccTacTacgTgggcccccTggccc |
| | | ggggcaacTcccggTTcgccTggaTgacccggaagTccgaggagaccaTcacccccTggaacTTc |
| | | gaggaggTggTggacaagggcgccTccgcccagTccTTcaTcgagcggaTgaccaacTTcgacaa |
| | | gaaccTgcccaacgagaaggTgcTgcccaagcacTcccTgcTgTacgagTacTTcaccgTgTaca |
| | | acgagcTgaccaaggTgaagTacgTgaccgagggcaTgcggaagcccgccTTccTgTccggcgag |
| | | cagaagaaggccaTcgTggaccTgcTgTTcaagaccaaccggaaggTgaccgTgaagcagcTgaa |
| | | ggaggacTacTTcaagaagaTcgagTgcTTcgacTccgTggagaTcTccggcgTggaggaccgg |
| | | TTcaacgccTcccTgggcaccTaccacgaccTgcTgaagaTcaTcaaggacaaggacTTccTgga |
| | | caacgaggagaacgaggacaTccTggaggacaTcgTgcTgacccTgacccTgTTcgaggaccggg |
| | | agaTgaTcgaggagcggcTgaagaccTacgcccaccTgTTcgacgacaaggTgaTgaagcagcTg |
| | | aagcggcggcggTacaccggcTggggccggcTgTcccggaagcTgaTcaacggcaTccgggacaa |
| | | gcagTccggcaagaccaTccTggacTTccTgaagTccgacggcTTcgccaaccggaacTTcaTgc |
| | | agcTgaTccacgacgacTcccTgaccTTcaaggaggacaTccagaaggcccaggTgTccggccag |
| | | ggcgacTcccTgcacgagcacaTcgccaaccTggccggcTcccccgccaTcaagaagggcaTccTg |
| | | cagaccgTgaaggTggTggacgagcTggTgaaggTgaTgggccggcacaagcccgagaacaTcgT |
| | | gaTcgagaTggcccgggagaaccagaccacccagaagggccagaagaacTcccgggagcggaTgaag |
| | | cggaTcgaggagggcaTcaaggagcTgggcTcccagaTccTgaaggagcaccccgTggagaacacc |
| | | cagcTgcagaacgagaagcTgTaccTgTacTaccTgcagaacggccgggacaTgTacgTggacca |
| | | ggagcTggacaTcaaccggcTgTccgacTacgacgTggaccacaTcgTgccccagTccTTccTga |
| | | aggacgacTccaTcgacaacaaggTgcTgacccggTccgacaagaaccggggcaagTccgacaacg |
| | | TgcccTccgaggaggTggTgaagaagaTgaagaacTacTggcggcagcTgcTgaacgccaagcTg |
| | | aTcacccagcggaagTTcgacaaccTgaccaaggccgagcggggcggccTgTccgagcTggacaag |
| | | gccggcTTcaTcaagcggcagcTggTggagacccggcagaTcaccaagcacgTggcccagaTccT |
| | | ggacTcccggaTgaacaccaagTacgacgagaacgacaagcTgaTccgggaggTgaaggTgaTcac |
| | | ccTgaagTccaagcTggTgTccgacTTccggaaggacTTccagTTcTacaaggTgcgggagaTc |
| | | aacaac TaccaccacgcccacgacgccTaccTgaacgccgTggTgggcaccgcccTgaTcaagaag |
| | | TaccccaagcTggagTccgagTTcgTgTacggcgacTacaaggTgTacgacgTgcggaagaTga |
| | | TcgccaagTccgagcaggagaTcggcaaggccaccgccaagTacTTcTTcTacTccaacaTcaTg |
| | | aacTTcTTcaagaccgagaTcacccTggccaacggcgagaTccggaagcggccccTgaTcgagacc |
| | | aacggcgagaccggcgagaTcgTgTgggacaagggccgggacTTcgccaccgTgcggaaggTgcT |
| | | gTccaTgccccaggTgaacaTcgTgaagaagaccgaggTgcagaccggcggcTTcTccaaggagT |
| | | ccaTccTgcccaagcggaacTccgacaagcTgaTcgcccggaagaaggacTgggaccccaagaagT |
| | | acggcggcTTcgacTcccccaccgTggccTacTccgTgcTggTggTggccaaggTggagaaggg |
| | | caagTccaagaagcTgaagTccgTgaaggagcTgcTgggcaTcaccaTcaTggagcggTccTcc |
| | | TTcgagaagaaccccaTcgacTTccTggaggccaagggcTacaaggaggTgaagaaggaccTgaT |
| | | caTcaagcTgcccaagTacTcccTgTTcgagcTggagaacggccggaagcggaTgcTggccTccg |
| | | ccggcgagcTgcagaagggcaacgagcTggcccTgcccTccaagTacgTgaacTTccTgTaccTg |
| | | gccTcccacTacgagaagcTgaagggcTcccccgaggacaacgagcagaagcagcTgTTcgTggag |
| | | cagcacaagcacTaccTggacgagaTcaTcgagcagaTcTccgagTTcTccaagcgggTgaTccT |
| | | ggccgacgccaaccTggacaaggTgcTgTccgccTacaacaagcaccgggacaagcccaTccggga |
| | | gcaggccgagaacaTcaTccaccTgTTcacccTgaccaaccTgggcgcccccgccgccTTcaagTa |
| | | cTTcgacaccaccaTcgaccggaagcggTacaccTccaccaaggaggTgcTggacgccacccTgaT |
| | | ccaccagTccaTcaccggccTgTacgagacccggaTcgaccTgTcccagcTgggcggcgacggcgg |
| | | cggcTcccccaagaagaagcggaaggTgTga |
| 308 | Open reading | AUGGACGGCUCCGGCGGCGGCUCCCCCAAGAAGAAGCGGAAGGUG |
| | frame for Nme2 | GAGGACAAGCGGCCCGCCGCCACCAAGAAGGCCGGCCAGGCCAAG |
| | BC22n base | AAGAAGAAGGGCGGCUCCGGCGGCGGCGAGGCCUCCCCCGCCUCC |
| | editor | GGCCCCCGGCACCUGAUGGACCCCCACAUCUUCACCUCCAACUUC |
| | | AACAACGGCAUCGGCCGGCACAAGACCUACCUGUGCUACGAGGUG |
| | | GAGCGGCUGGACAACGGCACCUCCGUGAAGAUGGACCAGCACCGG |
| | | GGCUUCCUGCACAACCAGGCCAAGAACCUGCUGUGCGGCUUCUAC |
| | | GGCCGGCACGCCGAGCUGCGGUUCCUGGACCUGGUGCCCUCCCUG |
| | | CAGCUGGACCCCGCCCAGAUCUACCGGGUGACCUGGUUCAUCUCC |
| | | UGGUCCCCCUGCUUCUCCUGGGGCUGCGCCGGCGAGGUGCGGGCC |
| | | UUCCUGCAGGAGAACACCCACGUGCGGCUGCGGAUCUUCGCCGCC |
| | | CGGAUCUACGACUACGACCCCCUGUACAAGGAGGCCCUGCAGAUG |
| | | CUGCGGGACGCCGGCGCCCAGGUGUCCAUCAUGACCUACGACGAG |
| | | UUCAAGCACUGCUGGGACACCUUCGUGGACCACCAGGGCUGCCCC |
| | | UUCCAGCCCUGGGACGGCCUGGACGAGCACUCCCAGGCCCUGUCC |
| | | GGCCGGCUGCGGGCCAUCCUGCAGAACCAGGGCAACUCCGGCUCC |
| | | GAGACCCCCGGCACCUCCGAGUCCGCCACCCCCGAGUCCGCAGCG |
| | | UUCAAACCAAAUcccaucaacuacauccugggccuggccaucggcaucgccuccgugggcu |
| | | gggccaugguggagaucgacgaggaggagaaccccauccggcugaucgaccugggcgugcgggugu |
| | | ucgagcgggccgaggugcccaagaccggcgacucccuggccauggcccggggcuggcccgguccgu |
| | | gcggcggcugacccgggggggcccaccggcugcugcgggcccggggcugcugaagcgggaggg |
| | | cgugcugcaggccgccgacuucgacgagaacggccugaucaagucccugcccaacacccccuggcagc |
| | | ugcgggccgccgcccuggaccggaagcugaccccccuggagugguccgccgugcugcugcaccugau |
| | | caagcaccggggcuaccugucccagcggaagaacgagggcgagaccgccgacaaggagcugggcgccc |
| | | ugcugaagggcguggccaacaacgcccacgcccugcagaccggcgacuuccggacccccgccgagcug |
| | | gcccugaacaaguucgagaaggaguccggccacauccggaaccagcgggggacuacucccacaccuu |
| | | cucccggaaggaccugcaggccgagcugauccugcuguucgagaagcagaaggaguucggcaacccc |
| | | cacguguccggcggccugaaggagggcaucgagacccugcugaugacccagcggcccgcccuguccg |
| | | gcgacgccgugcagaagaugcugggccacugcaccuucgagcccgccgagcccaaggccgccaagaac |
| | | accuacaccgccgagcgguucaucuggcugaccaagcugaacaaccugcggauccuggagcagggcu |
| | | ccgagcggccccugaccgacaccgagcgggccacccugauggacgagcccuaccggaaguccaagcug |
| | | accuacgcccaggcccggaagcugcugggccuggaggacaccgccuucuucaagggccugcgguacg |
| | | gcaaggacaacgccgaggccuccacccugauggagaugaaggccuaccacgccaucucccgggcccug |
| | | gagaaggagggccugaaggacaagaaguccccccugaaccuguccuccgagcugcaggacgagaucg |
| | | gcaccgccuucucccuguucaagaccgacgaggacaucaccggccggcugaaggaccgggugcagccc |
| | | gagauccuggaggcccugcugaagcacaucuccuucgacaaguucgugcagaucucccugaaggccc |
| | | ugcggcggaucgugccccugauggagcagggcaagcgguacgacgaggccugcgccgagaucuacgg |
| | | cgaccacuacggcaagaagaacaccgaggagaagaucuaccugccccccauccccgccgacgagaucc |
| | | ggaaccccguggugcugcgggcccugucccaggcccggaaggugaucaacggcguggugcggggu |
| | | acggcucccccgcccggauccacaucgagaccgcccgggaggugggcaaguccuucaaggaccggaag |
| | | gagaucgagaagcggcaggaggagaaccggaaggaccgggagaaggccgccgccaaguuccgggagu |
| | | acuuccccaacuucgugggcgagcccaaguccaaggacauccugaagcugcggcuguacgagcagca |
| | | gcacggcaagugccuguacuccggcaaggagaucaaccuggugcggcugaacgagaagggcuacgug |
| | | gagaucgaccacgcccugcccuucucccggaccugggacgacuccuucaacaacaaggugcuggugc |
| | | ugggcuccgagaaccagaacaagggcaaccagacccccuacgaguacuucaacggcaaggacaacucc |
| | | cgggaguggcaggaguucaaggcccggguggagaccucccgguucccccgguccaagaagcagcgga |
| | | uccugcugcagaaguucgacgaggacggcuucaaggagugcaaccugaacgacacccgguacgugaa |
| | | ccgcuuccugugccaguucguggccgaccacauccugcugaccggcaagggcaagggggguguuc |
| | | gccuccaacggccagaucaccaaccugcugggggcuucuggggccugcggaagguggggccgaga |
| | | acgaccggcaccacgcccuggacgccguggugguggccugcuccaccguggccaugcagcagaagau |
| | | cacccgguucgugcgguacaaggagaugaacgccuucgacggcaagaccaucgacaaggagaccggca |
| | | aggugcugcaccagaagacccacuucccccagcccugggaguuuucgcccaggaggugaugauccg |
| | | gguguucggcaagcccgacggcaagcccgaguucgaggaggccgacacccccgagaagcugcggacc |
| | | cugcuggccgagaagcuguccucccggcccgaggccgugcacgaguacgugaccccccuguucgugu |
| | | cccgggcccccaaccggaagauguccggcgcccacaaggacacccugcgguccgccaagcgguucgug |
| | | aagcacaacgagaagaucuccgugaagcggguguggcugaccgagaucaagcuggccgaccuggaga |
| | | acauggugaacuacaagaacggccgggagaucgagcuguacgaggcccugaaggcccggcuggaggc |
| | | cuacggcggcaacgccaagcaggccuucgaccccaaggacaaccccuucuacaagaagggcggccagc |
| | | uggugaaggccgugggguggagaagacccaggaguccggcgugcugcugaacaagaagaacgccua |
| | | caccaucgccgacaacggcgacauggugcggguggacguguucugcaagguggacaagaagggcaag |
| | | aaccaguacuucaucgugcccaucuacgccuggcagguggcgagaacauccugcccgacaucgacug |
| | | caagggcuaccggaucgacgacuccuacaccuucugcuucucccugcacaaguacgaccugaucgccu |
| | | uccagaaggacgagaaguccaagguggaguucgccuacuacaucaacugcgacuccuccaacggccgg |
| | | uucuaccuggccuggcacgacaagggcuccaaggagcagcaguuccggaucuccacccagaaccugg |
| | | ugcugauccagaaguaccaggugaacgagcugggcaaggagauccggcccugccggcugaagaagcg |
| | | gccccccgugcgguag |
| 309 | Open reading | AUGACCAACCUGUCCGACAUCAUCGAGAAGGAGACCGGCAAGCAG |
| | frame for uracil | CUGGUGAUCCAGGAGUCCAUCCUGAUGCUGCCCGAGGAGGUGGA |
| | glycosylase | GGAGGUGAUCGGCAACAAGCCCGAGUCCGACAUCCUGGUGCACAC |
| | inhibitor (UGI) | CGCCUACGACGAGUCCACCGACGAGAACGUGAUGCUGCUGACCUC |
| | | CGACGCCCCCGAGUACAAGCCCUGGGCCCUGGUGAUCCAGGACUC |
| | | CAACGGCGAGAACAAGAUCAAGAUGCUGUCCGGCGGCUCCAAGCG |
| | | GACCGCCGACGGCUCCGAGUUCGAGUCCCCCAAGAAGAAGCGGAA |
| | | GGUGGAGUGAUAG |
| 310 | Open reading | AUGGACGGCUCCGGCGGCGGCUCCCCCAAGAAGAAGCGGAAGGUG |
| | frame encoding | GAGGACAAGCGGCCCGCCGCCACCAAGAAGGCCGGCCAGGCCAAG |
| | Nme2 base editor | AAGAAGAAGGGCGGCUCCGGCGGCGGCGAGGCCUCCCCCGCCUCC |
| | | GGCCCCCGGCACCUGAUGGACCCCCACAUCUUCACCUCCAACUUC |
| | | AACAACGGCAUCGGCCGGCACAAGACCUACCUGUGCUACGAGGUG |
| | | GAGCGGCUGGACAACGGCACCUCCGUGAAGAUGGACCAGCACCGG |
| | | GGCUUCCUGCACAACCAGGCCAAGAACCUGCUGUGCGGCUUCUAC |
| | | GGCCGGCACGCCGAGCUGCGGUUCCUGGACCUGGUGCCCUCCCUG |
| | | CAGCUGGACCCCGCCCAGAUCUACCGGGUGACCUGGUUCAUCUCC |
| | | UGGUCCCCCUGCUUCUCCUGGGGCUGCGCCGGCGAGGUGCGGGCC |
| | | UUCCUGCAGGAGAACACCCACGUGCGGCUGCGGAUCUUCGCCGCC |
| | | CGGAUCUACGACUACGACCCCCUGUACAAGGAGGCCCUGCAGAUG |
| | | CUGCGGGACGCCGGCGCCCAGGUGUCCAUCAUGACCUACGACGAG |
| | | UUCAAGCACUGCUGGGACACCUUCGUGGACCACCAGGGCUGCCCC |
| | | UUCCAGCCCUGGGACGGCCUGGACGAGCACUCCCAGGCCCUGUCC |
| | | GGCCGGCUGCGGGCCAUCCUGCAGAACCAGGGCAACggcaccaaggacuc |
| | | caccaaggacauccccgagacccccuccaaggacGCAGCGUUCAAACCAAAUcccauca |
| | | acuacauccugggccuggccaucggcaucgccuccgugggugggccaugguggagaucgacgagga |
| | | ggagaaccccauccggcugaucgaccugggggggguguucgagcgggccgaggugcccaagacc |
| | | ggcgacucccuggccauggcccggcggcuggcccgguccgugcggcggcugacccggcggcgggccc |
| | | accggcugcuggggcccggcggcugcugaaggggaggggugcugcaggccgccgacuucgacga |
| | | gaacggccugaucaagucccugcccaacacccccuggcagcugcgggccgccgcccuggaccggaagc |
| | | ugaccccccuggagugguccgccgugcugcugcaccugaucaagcaccggggcuaccugucccagcg |
| | | gaagaacgagggcgagaccgccgacaaggagcugggcgcccugcugaagggguggccaacaacgcc |
| | | cacgcccugcagaccggcgacuuccggacccccgccgagcuggcccugaacaaguucgagaaggaguc |
| | | cggccacauccggaaccagcggggcgacuacucccacaccuucucccggaaggaccugcaggccgagc |
| | | ugauccugcuguucgagaagcagaaggaguucggcaacccccacguguccggggccugaaggaggg |
| | | caucgagacccugcugaugacccagcggcccgcccuguccggcgacgccgugcagaagaugcugggc |
| | | cacugcaccuucgagcccgccgagcccaaggccgccaagaacaccuacaccgccgagcgguucaucug |
| | | gcugaccaagcugaacaaccugcggauccuggagcagggcuccgagcggccccugaccgacaccgagc |
| | | gggccacccugauggacgagcccuaccggaaguccaagcugaccuacgcccaggcccggaagcugcug |
| | | ggccuggaggacaccgccuucuucaagggccugcgguacggcaaggacaacgccgaggccuccaccc |
| | | ugauggagaugaaggccuaccacgccaucucccgggcccuggagaaggagggccugaaggacaagaa |
| | | guccccccugaaccuguccuccgagcugcaggacgagaucggcaccgccuucucccuguucaagaccg |
| | | acgaggacaucaccggccggcugaaggaccgggugcagcccgagauccuggaggcccugcugaagca |
| | | caucuccuucgacaaguucgugcagaucucccugaaggcccugggggaugugccccugauggag |
| | | cagggcaagcgguacgacgaggccugcgccgagaucuacggcgaccacuacggcaagaagaacaccga |
| | | ggagaagaucuaccugccccccauccccgccgacgagauccggaaccccguggugcugcgggcccug |
| | | ucccaggcccggaaggugaucaacggcguggugcgggguacggcucccccgcccggauccacaucg |
| | | agaccgcccgggaggugggcaaguccuucaaggaccggaaggagaucgagaagcggcaggaggagaa |
| | | ccggaaggaccgggagaaggccgccgccaaguuccgggaguacuuccccaacuucgugggcgagccc |
| | | aaguccaaggacauccugaagcugcggcuguacgagcagcagcacggcaagugccuguacuccggca |
| | | aggagaucaaccuggugcggcugaacgagaagggcuacguggagaucgaccacgcccugcccuucuc |
| | | ccggaccugggacgacuccuucaacaacaaggugcuggugcugggcuccgagaaccagaacaagggc |
| | | aaccagacccccuacgaguacuucaacggcaaggacaacucccgggaguggcaggaguucaaggcccg |
| | | gguggagaccucccgguucccccgguccaagaagcagcggauccugcugcagaaguucgacgaggac |
| | | ggcuucaaggagugcaaccugaacgacacccgguacgugaaccgcuuccugugccaguucguggccg |
| | | accacauccugcugaccggcaagggcaagcggcggguguucgccuccaacggccagaucaccaaccug |
| | | cugcggggcuucuggggccugcggaagguggggccgagaacgaccggcaccacgcccuggacgccg |
| | | uggugguggccugcuccaccguggccaugcagcagaagaucacccgguucguggguacaaggagau |
| | | gaacgccuucgacggcaagaccaucgacaaggagaccggcaaggugcugcaccagaagacccacuucc |
| | | cccagcccugggaguucuucgcccaggaggugaugauccggguguucggcaagcccgacggcaagcc |
| | | cgaguucgaggaggccgacacccccgagaagcugcggacccugcuggccgagaagcuguccucccgg |
| | | cccgaggccgugcacgaguacgugaccccccuguucgugucccgggcccccaaccggaagauguccg |
| | | gcgcccacaaggacacccugcgguccgccaagcgguucgugaagcacaacgagaagaucuccgugaag |
| | | cggguguggcugaccgagaucaagcuggccgaccuggagaacauggugaacuacaagaacggccggg |
| | | agaucgagcuguacgaggcccugaaggcccggcuggaggccuacggcggcaacgccaagcaggccuu |
| | | cgaccccaaggacaaccccuucuacaagaagggcggccagcuggugaaggccgugcggguggagaag |
| | | acccaggaguccggcgugcugcugaacaagaagaacgccuacaccaucgccgacaacggcgacauggu |
| | | gggguggacguguucugcaagguggacaagaagggcaagaaccaguacuucaucgugcccaucuac |
| | | gccuggcagguggccgagaacauccugcccgacaucgacugcaagggcuaccggaucgacgacuccu |
| | | acaccuucugcuucucccugcacaaguacgaccugaucgccuuccagaaggacgagaaguccaaggug |
| | | gaguucgccuacuacaucaacugcgacuccuccaacggccgguucuaccuggccuggcacgacaagg |
| | | gcuccaaggagcagcaguuccggaucuccacccagaaccuggugcugauccagaaguaccaggugaac |
| | | gagcugggcaaggagauccggcccugccggcugaagaagcggccccccgugcgguag |
| 311 | Amino acid | MDGSGGGSPKKKRKVEDKRPAATKKAGQAKKKKGGSGGGEASPASG |
| | sequence of | PRHLMDPHIFTSNFNNGIGRHKTYLCYEVERLDNGTSVKMDQHRGFLH |
| | Nme2 base editor | NQAKNLLCGFYGRHAELRFLDLVPSLQLDPAQIYRVTWFISWSPCFSW |
| | | GCAGEVRAFLQENTHVRLRIFAARIYDYDPLYKEALQMLRDAGAQVSI |
| | | MTYDEFKHCWDTFVDHQGCPFQPWDGLDEHSQALSGRLRAILQNQG |
| | | NGTKDSTKDIPETPSKDAAFKPNPINYILGLAIGIASVGWAMVEIDEEEN |
| | | PIRLIDLGVRVFERAEVPKTGDSLAMARRLARSVRRLTRRRAHRLLRA |
| | | RRLLKREGVLQAADFDENGLIKSLPNTPWQLRAAALDRKLTPLEWSA |
| | | VLLHLIKHRGYLSQRKNEGETADKELGALLKGVANNAHALQTGDFRT |
| | | PAELALNKFEKESGHIRNQRGDYSHTFSRKDLQAELILLFEKQKEFGNP |
| | | HVSGGLKEGIETLLMTQRPALSGDAVQKMLGHCTFEPAEPKAAKNTY |
| | | TAERFIWLTKLNNLRILEQGSERPLTDTERATLMDEPYRKSKLTYAQA |
| | | RKLLGLEDTAFFKGLRYGKDNAEASTLMEMKAYHAISRALEKEGLKD |
| | | KKSPLNLSSELQDEIGTAFSLFKTDEDITGRLKDRVQPEILEALLKHISFD |
| | | KFVQISLKALRRIVPLMEQGKRYDEACAEIYGDHYGKKNTEEKIYLPPI |
| | | PADEIRNPVVLRALSQARKVINGVVRRYGSPARIHIETAREVGKSFKDR |
| | | KEIEKRQEENRKDREKAAAKFREYFPNFVGEPKSKDILKLRLYEQQHG |
| | | KCLYSGKEINLVRLNEKGYVEIDHALPFSRTWDDSFNNKVLVLGSENQ |
| | | NKGNQTPYEYFNGKDNSREWQEFKARVETSRFPRSKKQRILLQKFDED |
| | | GFKECNLNDTRYVNRFLCQFVADHILLTGKGKRRVFASNGQITNLLRG |
| | | FWGLRKVRAENDRHHALDAVVVACSTVAMQQKITRFVRYKEMNAFD |
| | | GKTIDKETGKVLHQKTHFPQPWEFFAQEVMIRVFGKPDGKPEFEEADT |
| | | PEKLRTLLAEKLSSRPEAVHEYVTPLFVSRAPNRKMSGAHKDTLRSAK |
| | | RFVKHNEKISVKRVWLTEIKLADLENMVNYKNGREIELYEALKARLEA |
| | | YGGNAKQAFDPKDNPFYKKGGQLVKAVRVEKTQESGVLLNKKNAYT |
| | | IADNGDMVRVDVFCKVDKKGKNQYFIVPIYAWQVAENILPDIDCKGY |
| | | RIDDSYTFCFSLHKYDLIAFQKDEKSKVEFAYYINCDSSNGRFYLAWH |
| | | DKGSKEQQFRISTQNLVLIQKYQVNELGKEIRPCRLKKRPPVR* |
| 312 | Exemplary | mN*mN*mN*mNmNNNmNmNNmNNmNNNNNmNNNNmNNNmGUUG |
| | modified Nme | mUmAmGmCUCCCmUmGmAmAmAmCmCGUUmGmCUAmCAAUAAG |
| | guide sgRNA | mGmCCmGmUmCmGmAmAmAmGmAmUGUGCmCGmCAAmCGCUCU |
| | | mGmCCmUmUmCmUGGCAUCG*mU*mU |
| 313 | Exemplary | mN*mN*mN*mNmNNNmNmNNmNNmNNNNNmNNNNmNNNmGUUG |
| | modified Nme | mUmAmGmCUCCCmUmGmAmAmAmCmCGUUmGmCUAmCAAU*AA |
| | guide sgRNA | GmGmCCmGmUmCmGmAmAmAmGmAmUGUGCmCGmCAAmCGmCm |
| | | UmCmUmGmCCmUmUmCmUGGCAUCG*mU*mU |
| 314 | Exemplary | mN*mN*mN*mNmNNNmNmNNmNNmNNNNNmNNNNmNNNmGUUG |
| | modified Nme | mUmAmGmCUCCCmUmGmAmAmAmCmCGUUmGmCUAmCAAUAAG |
| | guide sgRNA | mGmCCmGmUmCmGmAmAmAmGmAmUGUGCmCGmCAAmCGmCmU |
| | | mCmUmGmCCmUmUmCmUGGCAUCG*mU*mU |

TABLE 19
Exemplary SpyCas9 sgRNA conserved portion (SEQ ID NO: 226)

| 1 | 2 | 3 | 4 | 5 | 6 | 7 | 8 | 9 | 10 | 11 | 12 | 13 | 14 | 15 | 16 | 17 | 18 | 19 | 20 | 21 | 22 | 23 | 24 | 25 | 26 | 27 | 28 | 29 | 30 |
|---|---|---|---|---|---|---|---|---|---|---|---|---|---|---|---|---|---|---|---|---|---|---|---|---|---|---|---|---|---|
| G | U | U | U | U | A | G | A | G | C | U | A | G | A | A | A | U | A | G | C | A | A | G | U | U | A | A | A | A | U |
| LS1-LS6 | | | | | | B1-B2 | | US1-US12 | | | | | | | | | | | | B2-B6 | | | | LS7-LS12 | | | | | |
| 31 | 32 | 33 | 34 | 35 | 36 | 37 | 38 | 39 | 40 | 41 | 42 | 43 | 44 | 45 | 46 | 47 | 48 | 49 | 50 | 51 | 52 | 53 | 54 | 55 | 56 | 57 | 58 | 59 | 60 |
| A | A | G | G | C | U | A | G | U | C | C | G | U | U | A | U | C | A | A | C | U | U | G | A | A | A | A | A | G | U |

| Nexus | | | | | | | | | H1-1 through H1-12 | | | | | | |
|---|---|---|---|---|---|---|---|---|---|---|---|---|---|---|---|
| 61 | 62 | 63 | 64 | 65 | 66 | 67 | 68 | 69 | 70 | 71 | 72 | 73 | 74 | 75 | 76 |
| G | G | C | A | C | C | G | A | G | U | C | G | G | U | G | C |

| | |
|---|---|
| N | H2-1 through H2-15 |

TABLE 20
Exemplary NmeCas9 sgRNA conserved portion (SEQ ID NO: 400 (“Exemplary NmeCas9 sgRNA-1”)

| 1-24 | 25 | 26 | 27 | 28 | 29 | 30 | 31 | 32 | 33 |
|---|---|---|---|---|---|---|---|---|---|
| NNNNNNNNNNNNNNNNNNNNNNNN | G | U | U | G | U | A | G | C | U |

| | |
|---|---|
| | Lower stem |
| Guide region | Repeat/Anti-Repeat region |

| 34 | 35 | 36 | 37 | 38 | 39 | 40 | 41 | 42 | 43 | 44 | 45 | 46 | 47 | 48 |
|---|---|---|---|---|---|---|---|---|---|---|---|---|---|---|
| C | C | C | U | U | U | C | U | C | A | U | U | U | C | G |

| | |
|---|---|
| Lower stem | Upper stem |

Repeat/Anti-Repeat region

| 49 | 50 | 51 | 52 | 53 | 54 | 55 | 56 | 57 | 58 | 59 | 60 | 61 | 62 | 63 | 64 | 65 | 66 | 67 | 68 | 69 | 70 | 71 | 72 | 73 | 74 | 75 | 76 | 77 |
|---|---|---|---|---|---|---|---|---|---|---|---|---|---|---|---|---|---|---|---|---|---|---|---|---|---|---|---|---|
| G | A | A | A | C | G | A | A | A | U | G | A | G | A | A | C | C | G | U | U | G | C | U | A | C | A | A | U | A |

| | | |
|---|---|---|
| Loop | Upper stem | Lower stem |

Repeat/Anti-Repeat region

| 78 | 79 | 80 | 81 | 82 | 83 | 84 | 85 | 86 | 87 | 88 | 89 | 90 | 91 | 92 | 93 | 94 |
|---|---|---|---|---|---|---|---|---|---|---|---|---|---|---|---|---|
| A | G | G | C | C | G | U | C | U | G | A | A | A | A | G | A | U |

| | | |
|---|---|---|
| Stem | Loop | Stem (96: unpaired) |

Hairpin 1

| 95 | 96 | 97 | 98 | 99 | 100 | 101 | 102 | 103 | 104 | 105 | 106 | 107 | 108 |
|---|---|---|---|---|---|---|---|---|---|---|---|---|---|
| G | U | G | C | C | G | C | A | A | C | G | C | U | C |

| | | |
|---|---|---|
| Stem (96: unpaired) | Lower stem | Bulge |

| | |
|---|---|
| Hairpin 1 | Hairpin 2 |

| 109 | 110 | 111 | 112 | 113 | 114 | 115 | 116 | 117 | 118 | 119 | 120 | 121 | 122 |
|---|---|---|---|---|---|---|---|---|---|---|---|---|---|
| U | G | C | C | C | C | U | U | A | A | A | G | C | U |

| | |
|---|---|
| Upper Stem | Loop |

Hairpin 2

| 123 | 124 | 125 | 126 | 127 | 128 | 129 | 130 | 131 | 132 | 133 | 134 |
|---|---|---|---|---|---|---|---|---|---|---|---|
| U | C | U | G | C | U | U | U | A | A | G | G |

| | |
|---|---|
| Loop | Upper Stem |

Hairpin 2

| 135 | 136 | 137 | 138 | 139 | 140 | 141 | 142 | 143 | 144 | 145 |
|---|---|---|---|---|---|---|---|---|---|---|
| G | G | C | A | U | C | G | U | U | U | A |

| | | |
|---|---|---|
| Upper Stem | Bulge | Lower Stem |

| | |
|---|---|
| Hairpin 2 | Tail |

TABLE 21
Additional Exemplary Nme Guide RNAs

| | | | | | Genomic |
|---|---|---|---|---|---|
| | | Guide | Exemplary Guide RNA Full | | Coordinates |
| Guide ID | Target | Sequence | Sequence | Exemplary Guide RNA Modified Sequence | (hg38) |
| G013006 | TRAC | CUCUCAGCUG | CUCUCAGCUGGUACACGGCAG | mC*mU*mC*UCAGCUGGUACACGGCAGUUU | chr14: 22547524- |
| | | GUACACGGC | UUUUAGAGCUAGAAAUAGCAA | UAGAmGmCmUmAmGmAmAmAmUmAmGmC | 22547544 |
| | | A (SEQ ID NO: | GUUAAAAUAAGGCUAGUCCGU | AAGUUAAAAUAAGGCUAGUCCGUUAUCAm | |
| | | 315) | UAUCAACUUGAAAAAGUGGCA | AmCmUmUmGmAmAmAmAmAmGmUmGmGm | |
| | | | CCGAGUCGGUGCUUUU (SEQ ID | CmAmCmCmGmAmGmUmCmGmGmUmGmCm | |
| | | | NO: 316) | U*mU*mU*mU (SEQ ID NO: 317) | |
| G013675 | CIITA | CCCCCGGACG | CCCCCGGACGGUUCAAGCAAG | mC*mC*mC*CCGGACGGUUCAAGCAAGUUU | chr16: 10906853- |
| | | GUUCAAGCA | UUUUAGAGCUAGAAAUAGCAA | UAGAmGmCmUmAmGmAmAmAmUmAmGmC | 10906873 |
| | | A (SEQ ID NO: | GUUAAAAUAAGGCUAGUCCGU | AAGUUAAAAUAAGGCUAGUCCGUUAUCAm | |
| | | 318) | UAUCAACUUGAAAAAGUGGCA | AmCmUmUmGmAmAmAmAmAmGmUmGmGm | |
| | | | CCGAGUCGGUGCUUUU (SEQ ID | CmAmCmCmGmAmGmUmCmGmGmUmGmCm | |
| | | | NO: 319) | U*mU*mU*mU (SEQ ID NO: 320) | |
| G014832 | TRBC1 | GGCUCUCGG | GGCUCUCGGAGAAUGACGAGG | mG*mG*mC*UCUCGGAGAAUGACGAGGUUU | chr7: 142791996- |
| | | AGAAUGACG | UUUUAGAGCUAGAAAUAGCAA | UAGAmGmCmUmAmGmAmAmAmUmAmGmC | 142792016 |
| | | AG (SEQ ID | GUUAAAAUAAGGCUAGUCCGU | AAGUUAAAAUAAGGCUAGUCCGUUAUCAm | |
| | | NO: 321) | UAUCAACUUGAAAAAGUGGCA | AmCmUmUmGmAmAmAmAmAmGmUmGmGm | |
| | | | CCGAGUCGGUGCUUUU (SEQ ID | CmAmCmCmGmAmGmUmCmGmGmUmGmCm | |
| | | | NO: 322) | U*mU*mU*mU (SEQ ID NO: 323) | |
| G016239 | TRBC1 | GGCCUCGGCG | GGCCUCGGCGCUGACGAUCUG | mG*mG*mC*CUCGGCGCUGACGAUCUGUUU | chr7: 142792047- |
| | | CUGACGAUC | UUUUAGAGCUAGAAAUAGCAA | UAGAmGmCmUmAmGmAmAmAmUmAmGmC | 142792067 |
| | | U (SEQ ID NO: | GUUAAAAUAAGGCUAGUCCGU | AAGUUAAAAUAAGGCUAGUCCGUUAUCAm | |
| | | 324) | UAUCAACUUGAAAAAGUGGCA | AmCmUmUmGmAmAmAmAmAmGmUmGmGm | |
| | | | CCGAGUCGGUGCUUUU (SEQ ID | CmAmCmCmGmAmGmUmCmGmGmUmGmCm | |
| | | | NO: 325) | U*mU*mU*mU (SEQ ID NO: 326) | |
| G018995 | HLA-A | ACAGCGACGC | ACAGCGACGCCGCGAGCCAGG | mA*mC*mA*GCGACGCCGCGAGCCAGGUUU | chr6: 29942864- |
| | | CGCGAGCCAG | UUUUAGAGCUAGAAAUAGCAA | UAGAmGmCmUmAmGmAmAmAmUmAmGmC | 29942884 |
| | | (SEQ ID NO: | GUUAAAAUAAGGCUAGUCCGU | AAGUUAAAAUAAGGCUAGUCCGUUAUCAm | |
| | | 327) | UAUCAACUUGAAAAAGUGGCA | AmCmUmUmGmAmAmAmAmAmGmUmGmGm | |
| | | | CCGAGUCGGUGCUUUU (SEQ ID | CmAmCmCmGmAmGmUmCmGmGmUmGmCm | |
| | | | NO: 328) | U*mU*mU*mU (SEQ ID NO: 329) | |
| G021469 | TRAC | AUAUCCAGA | AUAUCCAGAACCCUGACCCUG | mA*mU*mA*mUmCCAmGmAAmCCmCUGACm | chr14: 22547505- |
| | | ACCCUGACCC | CCGGUUGUAGCUCCCUGAAAC | CCUGmCCGmGUUGmUmAmGmCUCCCmUmG | 22547529 |
| | | UGCCG (SEQ | CGUUGCUACAAUAAGGCCGUC | mAmAmAmCmCGUUmGmCUAmCAAU*AAGm | |
| | | ID NO: 330) | GAAAGAUGUGCCGCAACGCUC | GmCCmGmUmCmGmAmAmAmGmAmUGUGCm | |
| | | | UGCCUUCUGGCAUCGUU (SEQ | CGmCAAmCGCUCUmGmCCmUmUmCmUGGC | |
| | | | ID NO: 331) | AUCG*mU*mU (SEQ ID NO: 332) | |
| G023520 | TRAC | UUCAAAACC | UUCAAAACCUGUCAGUGAUUG | mU*mU*mC*AAAACCUGUCAGUGAUUGUUU | chr14: 22550571- |
| | | UGUCAGUGA | UUUUAGAGCUAGAAAUAGCAA | UAGAmGmCmUmAmGmAmAmAmUmAmGmC | 22550591 |
| | | UU (SEQ ID | GUUAAAAUAAGGCUAGUCCGU | AAGUUAAAAUAAGGCUAGUCCGUUAUCACG | |
| | | NO: 333) | UAUCACGAAAGGGCACCGAGU | AAAGGGCACCGAGUCGGmUmGmC*mU (SEQ | |
| | | | CGGUGCU (SEQ ID NO: 334) | ID NO: 335) | |
| G023521 | CIITA | CGCCCAGGUC | CGCCCAGGUCCUCACGUCUGG | mC*mG*mC*CCAGGUCCUCACGUCUGGUUUU | chr16: 10907539- |
| | | CUCACGUCUG | UUUUAGAGCUAGAAAUAGCAA | AGAmGmCmUmAmGmAmAmAmUmAmGmCA | 10907559 |
| | | (SEQ ID NO: | GUUAAAAUAAGGCUAGUCCGU | AGUUAAAAUAAGGCUAGUCCGUUAUCACGA | |
| | | 336) | UAUCACGAAAGGGCACCGAGU | AAGGGCACCGAGUCGGmUmGmC*mU (SEQ | |
| | | | CGGUGCU (SEQ ID NO: 337) | ID NO: 338) | |
| G023523 | HLA-A | GCUGCAGCGC | GCUGCAGCGCACGGGUACCAG | mG*mC*mU*GCAGCGCACGGGUACCAGUUU | chr6: 29943529- |
| | | ACGGGUACC | UUUUAGAGCUAGAAAUAGCAA | UAGAmGmCmUmAmGmAmAmAmUmAmGmC | 29943549 |
| | | A (SEQ ID NO: | GUUAAAAUAAGGCUAGUCCGU | AAGUUAAAAUAAGGCUAGUCCGUUAUCACG | |
| | | 339) | UAUCACGAAAGGGCACCGAGU | AAAGGGCACCGAGUCGGmUmGmC*mU (SEQ | |
| | | | CGGUGCU (SEQ ID NO: 340) | ID NO: 341) | |
| G023524 | TRBC2 | CCACACCCAA | CCACACCCAAAAGGCCACACG | mC*mC*mA*CACCCAAAAGGCCACACGUUUU | chr7: 142801104- |
| | | AAGGCCACAC | UUUUAGAGCUAGAAAUAGCAA | AGAmGmCmUmAmGmAmAmAmUmAmGmCA | 142801124 |
| | | (SEQ ID NO: | GUUAAAAUAAGGCUAGUCCGU | AGUUAAAAUAAGGCUAGUCCGUUAUCACGA | |
| | | 342) | UAUCACGAAAGGGCACCGAGU | AAGGGCACCGAGUCGGmUmGmC*mU (SEQ | |
| | | | CGGUGCU (SEQ ID NO: 343) | ID NO: 344) | |
| G026584 | CIITA | UCAAAGUAC | UCAAAGUACCCUACAGGAGGA | mU*mC*mA*mAmAGUmAmCCmCUmACAGGm | chr16: 10907504- |
| | | CCUACAGGA | CCAGUUGUAGCUCCCUGAAAC | AGGAmCCAmGUUGmUmAmGmCUCCCmUmG | 10907528 |
| | | GGACCA (SEQ | CGUUGCUACAAUAAGGCCGUC | mAmAmAmCmCGUUmGmCUAmCAAU*AAGm | |
| | | ID NO: 345) | GAAAGAUGUGCCGCAACGCUC | GmCCmGmUmCmGmAmAmAmGmAmUGUGCm | |
| | | | UGCCUUCUGGCAUCGUU (SEQ | CGmCAAmCGCUCUmGmCCmUmUmCmUGGC | |
| | | | ID NO: 346) | AUCG*mU*mU (SEQ ID NO: 347) | |
| G027891 | TRAC | UUCAAAACC | UUCAAAACCUGUCAGUGAUUG | mU*mU*mC*AAAACCUGUCAGUGAUUGUUU | chr14: 22550571- |
| | | UGUCAGUGA | UUUUAGAGCUAGAAAUAGCAA | UAGAmGmCmUmAmGmAmAmAmUmAmGmC | 22550591 |
| | | UU (SEQ ID | GUUAAAAUAAGGCUAGUCCGU | AAGUUAAAAUAAGGCUAGUCCGUUAUCACG | |
| | | NO: 348) | UAUCACGAAAGGGCACCGAGU | AAAGGGCACCGAGUCGGmU*mG*mC*mU | |
| | | | CGGUGCU (SEQ ID NO: 349) | (SEQ ID NO: 350) | |
| G027904 | TRBC2 | CCACACCCAA | CCACACCCAAAAGGCCACACG | mC*mC*mA*CACCCAAAAGGCCACACGUUUU | chr7: 142801104- |
| | | AAGGCCACAC | UUUUAGAGCUAGAAAUAGCAA | AGAmGmCmUmAmGmAmAmAmUmAmGmCA | 142801124 |
| | | | GUUAAAAUAAGGCUAGUCCGU | AGUUAAAAUAAGGCUAGUCCGUUAUCACGA | |
| | | (SEQ ID NO: | UAUCACGAAAGGGCACCGAGU | AAGGGCACCGAGUCGGmU*mG*mC*mU (SEQ | |
| | | 351) | CGGUGCU (SEQ ID NO: 352) | ID NO: 353) | |
| G028535 | CIITA | CGCCCAGGUC | CGCCCAGGUCCUCACGUCUGG | mC*mG*mC*CCAGGUCCUCACGUCUGGUUUU | chr16: 10907539- |
| | | CUCACGUCUG | UUUUAGAGCUAGAAAUAGCAA | AGAmGmCmUmAmGmAmAmAmUmAmGmCA | 10907559 |
| | | (SEQ ID NO: | GUUAAAAUAAGGCUAGUCCGU | AGUUAAAAUAAGGCUAGUCCGUUAUCACGA | |
| | | 354) | UAUCACGAAAGGGCACCGAGU | AAGGGCACCGAGUCGGmU*mG*mC*mU (SEQ | |
| | | | CGGUGCU (SEQ ID NO: 355) | ID NO: 356) | |
| G028536 | HLA-A | GCUGCAGCGC | GCUGCAGCGCACGGGUACCAG | mG*mC*mU*GCAGCGCACGGGUACCAGUUU | chr6: 29943529- |
| | | ACGGGUACC | UUUUAGAGCUAGAAAUAGCAA | UAGAmGmCmUmAmGmAmAmAmUmAmGmC | 29943549 |
| | | A (SEQ ID NO: | GUUAAAAUAAGGCUAGUCCGU | AAGUUAAAAUAAGGCUAGUCCGUUAUCACG | |
| | | 357) | UAUCACGAAAGGGCACCGAGU | AAAGGGCACCGAGUCGGmU*mG*mC*mU | |
| | | | CGGUGCU (SEQ ID NO: 358) | (SEQ ID NO: 359) | |
| G028907 | HLA-A | UCCUGCUCUA | UCCUGCUCUAUCCACGGCGCC | mU*mC*mC*mUmGCUmCmUAmUCmCACGGm | chr6: 29942895- |
| | | UCCACGGCGC | CGCGUUGUAGCUCCCUGAAAC | CGCCmCGCmGUUGmUmAmGmCUCCCmUmG | 29942919 |
| | | CCGC (SEQ ID | CGUUGCUACAAUAAGGCCGUC | mAmAmAmCmCGUUmGmCUAmCAAU*AAGm | |
| | | NO: 360) | GAAAGAUGUGCCGCAACGCUC | GmCCmGmUmCmGmAmAmAmGmAmUGUGCm | |
| | | | UGCCUUCUGGCAUCGUU (SEQ | CGmCAAmCGCUCUmGmCCmUmUmCmUGGC | |
| | | | ID NO: 361) | AUCG*mU*mU (SEQ ID NO: 362) | |
| G028986 | TRBC1 | GUGUCCUACC | GUGUCCUACCAGCAAGGGGUC | mG*mU*mG*mUmCCUmAmCCmAGmCAAGGm | chr7: 142792690- |
| | | AGCAAGGGG | CUGGUUGUAGCUCCCUGAAAC | GGUCmCUGmGUUGmUmAmGmCUCCCmUmG | 142792714 |
| | | UCCUG (SEQ | CGUUGCUACAAUAAGGCCGUC | mAmAmAmCmCGUUmGmCUAmCAAU*AAGm | |
| | | ID NO: 363) | GAAAGAUGUGCCGCAACGCUC | GmCCmGmUmCmGmAmAmAmGmAmUGUGCm | |
| | | | UGCCUUCUGGCAUCGUU (SEQ | CGmCAAmCGCUCUmGmCCmUmUmCmUGGC | |
| | | | ID NO: 364) | AUCG*mU*mU (SEQ ID NO: 365) | |
| G028918 | HLA-A | GCUCUAUCCA | GCUCUAUCCACGGCGCCCGCG | mG*mC*mU*mCmUAUmCmCAmCGmGCGCCm | chr6: 29942891- |
| | | CGGCGCCCGC | GCUGUUGUAGCUCCCUGAAAC | CGCGmGCUmGUUGmUmAmGmCUCCCmUmG | 29942915 |
| | | GGCU (SEQ ID | CGUUGCUACAAUAAGGCCGUC | mAmAmAmCmCGUUmGmCUAmCAAU*AAGm | |
| | | NO: 366) | GAAAGAUGUGCCGCAACGCUC | GmCCmGmUmCmGmAmAmAmGmAmUGUGCm | |
| | | | UGCCUUCUGGCAUCGUU (SEQ | CGmCAAmCGCUCUmGmCCmUmUmCmUGGC | |
| | | | ID NO: 367) | AUCG*mU*mU (SEQ ID NO: 368) | |
| G034202 | HLA-A | GCUCUAUCCA | GCUCUAUCCACGGCGCCCGCG | mG*mC*mU*mCmUAUmCmCAmCGmGCGCCm | chr6: 29942891- |
| | | CGGCGCCCGC | GCUGUUGUAGCUCCCUGAAAC | CGCGmGCUmGUUGmUmAmGmCUCCCmUmG | 29942915 |
| | | GGCU (SEQ ID | CGUUGCUACAAUAAGGCCGUC | mAmAmAmCmCGUUmGmCUAmCAAUAAGmG | |
| | | NO: 366) | GAAAGAUGUGCCGCAACGCUC | mCCmGmUmCmGmAmAmAmGmAmUGUGCmC | |
| | | | UGCCUUCUGGCAUCGUU (SEQ | GmCAAmCGCUCUmGmCCmUmUmCmUGGCA | |
| | | | ID NO: 367) | UCG*mU*mU (SEQ ID NO: 369) | |
| G028913 | HLA-A | CACUCACCCG | CACUCACCCGCCCAGGUCUGG | mC*mA*mC*mUmCACmCmCGmCCmCAGGUm | chr6: 29942609- |
| | | CCCAGGUCUG | GUCGUUGUAGCUCCCUGAAAC | CUGGmGUCmGUUGmUmAmGmCUCCCmUmG | 29942633 |
| | | GGUC (SEQ ID | CGUUGCUACAAUAAGGCCGUC | mAmAmAmCmCGUUmGmCUAmCAAU*AAGm | |
| | | NO: 370) | GAAAGAUGUGCCGCAACGCUC | GmCCmGmUmCmGmAmAmAmGmAmUGUGCm | |
| | | | UGCCUUCUGGCAUCGUU (SEQ | CGmCAAmCGCUCUmGmCCmUmUmCmUGGC | |
| | | | ID NO: 371) | AUCG *mU*mU (SEQ ID NO: 372) | |
| G034617 | HLA-A | CACUCACCCG | CACUCACCCGCCCAGGUCUGG | mC*mA*mC*mUmCACmCmCGmCCmCAGGUm | chr6: 29942609- |
| | | CCCAGGUCUG | GUCGUUGUAGCUCCCUGAAAC | CUGGmGUCmGUUGmUmAmGmCUCCCmUmG | 29942633 |
| | | GGUC (SEQ ID | CGUUGCUACAAUAAGGCCGUC | mAmAmAmCmCGUUmGmCUAmCAAUAAGmG | |
| | | NO: 370) | GAAAGAUGUGCCGCAACGCUC | mCCmGmUmCmGmAmAmAmGmAmUGUGCmC | |
| | | | UGCCUUCUGGCAUCGUU (SEQ | GmCAAmCGCUCUmGmCCmUmUmCmUGGCA | |
| | | | ID NO: 371) | UCG*mU*mU (SEQ ID NO: 373) | |
| G028943 | TRAC | AAAACCUGU | AAAACCUGUCAGUGAUUGGGU | mA*mA*mA*mAmCCUmGmUCmAGmUGAUUm | chr14: 22550574- |
| | | CAGUGAUUG | UCCGUUGUAGCUCCCUGAAAC | GGGUmUCCmGUUGmUmAmGmCUCCCmUmG | 22550598 |
| | | GGUUCC (SEQ | CGUUGCUACAAUAAGGCCGUC | mAmAmAmCmCGUUmGmCUAmCAAU*AAGm | |
| | | ID NO: 374) | GAAAGAUGUGCCGCAACGCUC | GmCCmGmUmCmGmAmAmAmGmAmUGUGCm | |
| | | | UGCCUUCUGGCAUCGUU (SEQ | CGmCAAmCGCUCUmGmCCmUmUmCmUGGC | |
| | | | ID NO: 375) | AUCG*mU*mU (SEQ ID NO: 376) | |
| G034982 | TRAC | AAAACCUGU | AAAACCUGUCAGUGAUUGGGU | mA*mA*mA*mAmCCUmGmUCmAGmUGAUUm | chr14: 22550574- |
| | | CAGUGAUUG | UCCGUUGUAGCUCCCUGAAAC | GGGUmUCCmGUUGmUmAmGmCUCCCmUmG | 22550598 |
| | | GGUUCC (SEQ | CGUUGCUACAAUAAGGCCGUC | mAmAmAmCmCGUUmGmCUAmCAAUAAGmG | |
| | | ID NO: 374) | GAAAGAUGUGCCGCAACGCUC | mCCmGmUmCmGmAmAmAmGmAmUGUGCmC | |
| | | | UGCCUUCUGGCAUCGUU (SEQ | GmCAAmCGCUCUmGmCCmUmUmCmUGGCA | |
| | | | ID NO: 375) | UCG*mU*mU (SEQ ID NO: 377) | |
| G028939 | TRAC | UUAGGUUCG | UUAGGUUCGUAUCUGUAAAAC | mU*mU*mA*mGmGUUmCmGUmAUmCUGUA | chr14: 22550544- |
| | | UAUCUGUAA | CAAGUUGUAGCUCCCUGAAAC | mAAACmCAAmGUUGmUmAmGmCUCCCmUm | 22550568 |
| | | AACCAA (SEQ | CGUUGCUACAAUAAGGCCGUC | GmAmAmAmCmCGUUmGmCUAmCAAU*AAG | |
| | | ID NO: 378) | GAAAGAUGUGCCGCAACGCUC | mGmCCmGmUmCmGmAmAmAmGmAmUGUGC | |
| | | | UGCCUUCUGGCAUCGUU (SEQ | mCGmCAAmCGCUCUmGmCCmUmUmCmUGG | |
| | | | ID NO: 379) | CAUCG*mU*mU (SEQ ID NO: 380) | |
| G034981 | TRAC | UUAGGUUCG | UUAGGUUCGUAUCUGUAAAAC | mU*mU*mA*mGmGUUmCmGUmAUmCUGUA | chr14: 22550544- |
| | | UAUCUGUAA | CAAGUUGUAGCUCCCUGAAAC | mAAACmCAAmGUUGmUmAmGmCUCCCmUm | 22550568 |
| | | AACCAA (SEQ | CGUUGCUACAAUAAGGCCGUC | GmAmAmAmCmCGUUmGmCUAmCAAUAAGm | |
| | | ID NO: 378) | GAAAGAUGUGCCGCAACGCUC | GmCCmGmUmCmGmAmAmAmGmAmUGUGCm | |
| | | | UGCCUUCUGGCAUCGUU (SEQ | CGmCAAmCGCUCUmGmCCmUmUmCmUGGC | |
| | | | ID NO: 379) | AUCG*mU*mU (SEQ ID NO: 381) | |
| G028986 | TRBC1 | GUGUCCUACC | GUGUCCUACCAGCAAGGGGUC | mG*mU*mG*mUmCCUmAmCCmAGmCAAGGm | chr7: 142792690- |
| | | AGCAAGGGG | CUGGUUGUAGCUCCCUGAAAC | GGUCmCUGmGUUGmUmAmGmCUCCCmUmG | 142792714 |
| | | UCCUG (SEQ | CGUUGCUACAAUAAGGCCGUC | mAmAmAmCmCGUUmGmCUAmCAAU*AAGm | |
| | | ID NO: 363) | GAAAGAUGUGCCGCAACGCUC | GmCCmGmUmCmGmAmAmAmGmAmUGUGCm | |
| | | | UGCCUUCUGGCAUCGUU (SEQ | CGmCAAmCGCUCUmGmCCmUmUmCmUGGC | |
| | | | ID NO: 364) | AUCG*mU*mU (SEQ ID NO: 365) | |
| G034618 | TRBC1 | GUGUCCUACC | GUGUCCUACCAGCAAGGGGUC | mG*mU*mG*mUmCCUmAmCCmAGmCAAGGm | chr7: 142792690- |
| | | AGCAAGGGG | CUGGUUGUAGCUCCCUGAAAC | GGUCmCUGmGUUGmUmAmGmCUCCCmUmG | 142792714 |
| | | UCCUG (SEQ | CGUUGCUACAAUAAGGCCGUC | mAmAmAmCmCGUUmGmCUAmCAAUAAGmG | |
| | | ID NO: 363) | GAAAGAUGUGCCGCAACGCUC | mCCmGmUmCmGmAmAmAmGmAmUGUGCmC | |
| | | | UGCCUUCUGGCAUCGUU (SEQ | GmCAAmCGCUCUmGmCCmUmUmCmUGGCA | |
| | | | ID NO: 364) | UCG*mU*mU (SEQ ID NO: 382) | |
| G026584 | CIITA | UCAAAGUAC | UCAAAGUACCCUACAGGAGGA | mUmC*mA*mAmAGUmAmCCmCUmACAGGm | chr16: 10907504- |
| | | CCUACAGGA | CCAGUUGUAGCUCCCUGAAAC | AGGAmCCAmGUUGmUmAmGmCUCCCmUmG | 10907528 |
| | | GGACCA (SEQ | CGUUGCUACAAUAAGGCCGUC | mAmAmAmCmCGUUmGmCUAmCAAU*AAGm | |
| | | ID NO: 345) | GAAAGAUGUGCCGCAACGCUC | GmCCmGmUmCmGmAmAmAmGmAmUGUGCm | |
| | | | UGCCUUCUGGCAUCGUU (SEQ | CGmCAAmCGCUCUmGmCCmUmUmCmUGGC | |
| | | | ID NO: 346) | AUCG*mU*mU (SEQ ID NO: 347) | |
| G034201 | CIITA | UCAAAGUAC | UCAAAGUACCCUACAGGAGGA | mU*mC*mA*mAmAGUmAmCCmCUmACAGGm | chr16: 10907504- |
| | | CCUACAGGA | CCAGUUGUAGCUCCCUGAAAC | AGGAmCCAmGUUGmUmAmGmCUCCCmUmG | 10907528 |
| | | GGACCA (SEQ | CGUUGCUACAAUAAGGCCGUC | mAmAmAmCmCGUUmGmCUAmCAAUAAGmG | |
| | | ID NO: 345) | GAAAGAUGUGCCGCAACGCUC | mCCmGmUmCmGmAmAmAmGmAmUGUGCmC | |
| | | | UGCCUUCUGGCAUCGUU (SEQ | GmCAAmCGCUCUmGmCCmUmUmCmUGGCA | |
| | | | ID NO: 346) | UCG*mU*mU (SEQ ID NO: 383) | |
| G029131 | CIITA | AGCUGCCGU | AGCUGCCGUUCUGCCCAGUCC | mA*mG*mC*mUmGCCmGmUUmCUmGCCCAm | chr16: 10906643- |
| | | UCUGCCCAGU | GGGGUUGUAGCUCCCUGAAAC | GUCCmGGGmGUUGmUmAmGmCUCCCmUmG | 10906667 |
| | | CCGGG (SEQ | CGUUGCUACAAUAAGGCCGUC | mAmAmAmCmCGUUmGmCUAmCAAU*AAGm | |
| | | ID NO: 384) | GAAAGAUGUGCCGCAACGCUC | GmCCmGmUmCmGmAmAmAmGmAmUGUGCm | |
| | | | UGCCUUCUGGCAUCGUU (SEQ | CGmCAAmCGCUCUmGmCCmUmUmCmUGGC | |
| | | | ID NO: 385) | AUCG*mU*mU (SEQ ID NO: 386) | |
| G034619 | CIITA | AGCUGCCGU | AGCUGCCGUUCUGCCCAGUCC | mA*mG*mC*mUmGCCmGmUUmCUmGCCCAm | chr16: 10906643- |
| | | UCUGCCCAGU | GGGGUUGUAGCUCCCUGAAAC | GUCCmGGGmGUUGmUmAmGmCUCCCmUmG | 10906667 |
| | | CCGGG (SEQ | CGUUGCUACAAUAAGGCCGUC | mAmAmAmCmCGUUmGmCUAmCAAUAAGmG | |
| | | ID NO: 384) | GAAAGAUGUGCCGCAACGCUC | mCCmGmUmCmGmAmAmAmGmAmUGUGCmC | |
| | | | UGCCUUCUGGCAUCGUU (SEQ | GmCAAmCGCUCUmGmCCmUmUmCmUGGCA | |
| | | | ID NO: 385) | UCG*mU*mU (SEQ ID NO: 387) | |
| G032794 | HLA-B | UCUGGGAAA | UCUGGGAAAGGAGGGGAAGAU | mU*mC*mU*mGmGGAmAmAGmGAmGGGGA | chr6: 31355222- |
| | | GGAGGGGAA | GAGGUUGUAGCUCCCUGAAAC | mAGAUmGAGmGUUGmUmAmGmCUCCCmUm | 31355246 |
| | | GAUGAG (SEQ | CGUUGCUACAAUAAGGCCGUC | GmAmAmAmCmCGUUmGmCUAmCAAU*AAG | |
| | | ID NO: 388) | GAAAGAUGUGCCGCAACGCUC | mGmCCmGmUmCmGmAmAmAmGmAmUGUGC | |
| | | | UGCCUUCUGGCAUCGUU (SEQ | mCGmCAAmCGCUCUmGmCCmUmUmCmUGG | |
| | | | ID NO: 389) | CAUCG*mU*mU (SEQ ID NO: 390) | |
| G034208 | HLA-B | UCUGGGAAA | UCUGGGAAAGGAGGGGAAGAU | mU*mC*mU*mGmGGAmAmAGmGAmGGGGA | chr6: 31355222- |
| | | GGAGGGGAA | GAGGUUGUAGCUCCCUGAAAC | mAGAUmGAGmGUUGmUmAmGmCUCCCmUm | 31355246 |
| | | GAUGAG (SEQ | CGUUGCUACAAUAAGGCCGUC | GmAmAmAmCmCGUUmGmCUAmCAAUAAGm | |
| | | ID NO: 388) | GAAAGAUGUGCCGCAACGCUC | GmCCmGmUmCmGmAmAmAmGmAmUGUGCm | |
| | | | UGCCUUCUGGCAUCGUU (SEQ | CGmCAAmCGCUCUmGmCCmUmUmCmUGGC | |
| | | | ID NO: 389) | AUCG*mU*mU (SEQ ID NO: 391) | |
| G032795 | HLA-B | CUCUGGGAA | CUCUGGGAAAGGAGGGGAAGA | mC*mU*mC*mUmGGGmAmAAmGGmAGGGG | chr6: 31355221- |
| | | AGGAGGGGA | UGAGUUGUAGCUCCCUGAAAC | mAAGAmUGAmGUUGmUmAmGmCUCCCmUm | 31355245 |
| | | AGAUGA (SEQ | CGUUGCUACAAUAAGGCCGUC | GmAmAmAmCmCGUUmGmCUAmCAAU*AAG | |
| | | ID NO: 392) | GAAAGAUGUGCCGCAACGCUC | mGmCCmGmUmCmGmAmAmAmGmAmUGUGC | |
| | | | UGCCUUCUGGCAUCGUU (SEQ | mCGmCAAmCGCUCUmGmCCmUmUmCmUGG | |
| | | | ID NO: 393) | CAUCG*mU*mU (SEQ ID NO: 394) | |
| G034209 | HLA-B | CUCUGGGAA | CUCUGGGAAAGGAGGGGAAGA | mC*mU*mC*mUmGGGmAmAAmGGmAGGGG | chr6: 31355221- |
| | | AGGAGGGGA | UGAGUUGUAGCUCCCUGAAAC | mAAGAmUGAmGUUGmUmAmGmCUCCCmUm | 31355245 |
| | | AGAUGA (SEQ | CGUUGCUACAAUAAGGCCGUC | GmAmAmAmCmCGUUmGmCUAmCAAUAAGm | |
| | | ID NO: 392) | GAAAGAUGUGCCGCAACGCUC | GmCCmGmUmCmGmAmAmAmGmAmUGUGCm | |
| | | | UGCCUUCUGGCAUCGUU (SEQ | CGmCAAmCGCUCUmGmCCmUmUmCmUGGC | |
| | | | ID NO: 393) | AUCG*mU*mU (SEQ ID NO: 395) | |
| G032806 | HLA-B | UCCCAGAGCC | UCCCAGAGCCGUCUUCCCAGU | mU*mC*mC*mCmAGAmGmCCmGUmCUUCCm | chr6: 31355205- |
| | | GUCUUCCCAG | CCAGUUGUAGCUCCCUGAAAC | CAGUmCCAmGUUGmUmAmGmCUCCCmUmG | 31355229 |
| | | UCCA (SEQ ID | CGUUGCUACAAUAAGGCCGUC | mAmAmAmCmCGUUmGmCUAmCAAU*AAGm | |
| | | NO: 396) | GAAAGAUGUGCCGCAACGCUC | GmCCmGmUmCmGmAmAmAmGmAmUGUGCm | |
| | | | UGCCUUCUGGCAUCGUU (SEQ | CGmCAAmCGCUCUmGmCCmUmUmCmUGGC | |
| | | | ID NO: 397) | AUCG*mU*mU (SEQ ID NO: 398) | |
| G034211 | HLA-B | UCCCAGAGCC | UCCCAGAGCCGUCUUCCCAGU | mU*mC*mC*mCmAGAmGmCCmGUmCUUCCm | chr6: 31355205- |
| | | GUCUUCCCAG | CCAGUUGUAGCUCCCUGAAAC | CAGUmCCAmGUUGmUmAmGmCUCCCmUmG | 31355229 |
| | | UCCA (SEQ ID | CGUUGCUACAAUAAGGCCGUC | mAmAmAmCmCGUUmGmCUAmCAAUAAGmG | |
| | | NO: 396) | GAAAGAUGUGCCGCAACGCUC | mCCmGmUmCmGmAmAmAmGmAmUGUGCmC | |
| | | | UGCCUUCUGGCAUCGUU (SEQ | GmCAAmCGCUCUmGmCCmUmUmCmUGGCA | |
| | | | ID NO: 397) | UCG*mU*mU (SEQ ID NO: 399) | |

The application's sequence listing, which the Patent Office published only in electronic form, follows.

SEQUENCE LISTING (407 sequences)

SEQ ID NO: 1 - RNA, 5342 nt, synthetic construct
  source 1..5342: mol_type = other RNA
gggaagctcagaataaacgctcaactttggccggatctgccaccatggaggcctcccccgcctccggcccccggcacctgatggacccccacatcttcacctccaacttcaacaacggcatcggccggcacaagacctacctgtgctacgaggtggagcggctggacaacggcacctccgtgaagatggaccagcaccggggcttcctgcacaaccaggccaagaacctgctgtgcggcttctacggccggcacgccgagctgcggttcctggacctggtgccctccctgcagctggaccccgcccagatctaccgggtgacctggttcatctcctggtccccctgcttctcctggggctgcgccggcgaggtgcgggccttcctgcaggagaacacccacgtgcggctgcggatcttcgccgcccggatctacgactacgaccccctgtacaaggaggccctgcagatgctgcgggacgccggcgcccaggtgtccatcatgacctacgacgagttcaagcactgctgggacaccttcgtggaccaccagggctgccccttccagccctgggacggcctggacgagcactcccaggccctgtccggccggctgcgggccatcctgcagaaccagggcaactccggctccgagacccccggcacctccgagtccgccacccccgagtccgacaagaagtactccatcggcctggccatcggcaccaactccgtgggctgggccgtgatcaccgacgagtacaaggtgccctccaagaagttcaaggtgctgggcaacaccgaccggcactccatcaagaagaacctgatcggcgccctgctgttcgactccggcgagaccgccgaggccacccggctgaagcggaccgcccggcggcggtacacccggcggaagaaccggatctgctacctgcaggagatcttctccaacgagatggccaaggtggacgactccttcttccaccggctggaggagtccttcctggtggaggaggacaagaagcacgagcggcaccccatcttcggcaacatcgtggacgaggtggcctaccacgagaagtaccccaccatctaccacctgcggaagaagctggtggactccaccgacaaggccgacctgcggctgatctacctggccctggcccacatgatcaagttccggggccacttcctgatcgagggcgacctgaaccccgacaactccgacgtggacaagctgttcatccagctggtgcagacctacaaccagctgttcgaggagaaccccatcaacgcctccggcgtggacgccaaggccatcctgtccgcccggctgtccaagtcccggcggctggagaacctgatcgcccagctgcccggcgagaagaagaacggcctgttcggcaacctgatcgccctgtccctgggcctgacccccaacttcaagtccaacttcgacctggccgaggacgccaagctgcagctgtccaaggacacctacgacgacgacctggacaacctgctggcccagatcggcgaccagtacgccgacctgttcctggccgccaagaacctgtccgacgccatcctgctgtccgacatcctgcgggtgaacaccgagatcaccaaggcccccctgtccgcctccatgatcaagcggtacgacgagcaccaccaggacctgaccctgctgaaggccctggtgcggcagcagctgcccgagaagtacaaggagatcttcttcgaccagtccaagaacggctacgccggctacatcgacggcggcgcctcccaggaggagttctacaagttcatcaagcccatcctggagaagatggacggcaccgaggagctgctggtgaagctgaaccgggaggacctgctgcggaagcagcggaccttcgacaacggctccatcccccaccagatccacctgggcgagctgcacgccatcctgcggcggcaggaggacttctaccccttcctgaaggacaaccgggagaagatcgagaagatcctgaccttccggatcccctactacgtgggccccctggcccggggcaactcccggttcgcctggatgacccggaagtccgaggagaccatcaccccctggaacttcgaggaggtggtggacaagggcgcctccgcccagtccttcatcgagcggatgaccaacttcgacaagaacctgcccaacgagaaggtgctgcccaagcactccctgctgtacgagtacttcaccgtgtacaacgagctgaccaaggtgaagtacgtgaccgagggcatgcggaagcccgccttcctgtccggcgagcagaagaaggccatcgtggacctgctgttcaagaccaaccggaaggtgaccgtgaagcagctgaaggaggactacttcaagaagatcgagtgcttcgactccgtggagatctccggcgtggaggaccggttcaacgcctccctgggcacctaccacgacctgctgaagatcatcaaggacaaggacttcctggacaacgaggagaacgaggacatcctggaggacatcgtgctgaccctgaccctgttcgaggaccgggagatgatcgaggagcggctgaagacctacgcccacctgttcgacgacaaggtgatgaagcagctgaagcggcggcggtacaccggctggggccggctgtcccggaagctgatcaacggcatccgggacaagcagtccggcaagaccatcctggacttcctgaagtccgacggcttcgccaaccggaacttcatgcagctgatccacgacgactccctgaccttcaaggaggacatccagaaggcccaggtgtccggccagggcgactccctgcacgagcacatcgccaacctggccggctcccccgccatcaagaagggcatcctgcagaccgtgaaggtggtggacgagctggtgaaggtgatgggccggcacaagcccgagaacatcgtgatcgagatggcccgggagaaccagaccacccagaagggccagaagaactcccgggagcggatgaagcggatcgaggagggcatcaaggagctgggctcccagatcctgaaggagcaccccgtggagaacacccagctgcagaacgagaagctgtacctgtactacctgcagaacggccgggacatgtacgtggaccaggagctggacatcaaccggctgtccgactacgacgtggaccacatcgtgccccagtccttcctgaaggacgactccatcgacaacaaggtgctgacccggtccgacaagaaccggggcaagtccgacaacgtgccctccgaggaggtggtgaagaagatgaagaactactggcggcagctgctgaacgccaagctgatcacccagcggaagttcgacaacctgaccaaggccgagcggggcggcctgtccgagctggacaaggccggcttcatcaagcggcagctggtggagacccggcagatcaccaagcacgtggcccagatcctggactcccggatgaacaccaagtacgacgagaacgacaagctgatccgggaggtgaaggtgatcaccctgaagtccaagctggtgtccgacttccggaaggacttccagttctacaaggtgcgggagatcaacaactaccaccacgcccacgacgcctacctgaacgccgtggtgggcaccgccctgatcaagaagtaccccaagctggagtccgagttcgtgtacggcgactacaaggtgtacgacgtgcggaagatgatcgccaagtccgagcaggagatcggcaaggccaccgccaagtacttcttctactccaacatcatgaacttcttcaagaccgagatcaccctggccaacggcgagatccggaagcggcccctgatcgagaccaacggcgagaccggcgagatcgtgtgggacaagggccgggacttcgccaccgtgcggaaggtgctgtccatgccccaggtgaacatcgtgaagaagaccgaggtgcagaccggcggcttctccaaggagtccatcctgcccaagcggaactccgacaagctgatcgcccggaagaaggactgggaccccaagaagtacggcggcttcgactcccccaccgtggcctactccgtgctggtggtggccaaggtggagaagggcaagtccaagaagctgaagtccgtgaaggagctgctgggcatcaccatcatggagcggtcctccttcgagaagaaccccatcgacttcctggaggccaagggctacaaggaggtgaagaaggacctgatcatcaagctgcccaagtactccctgttcgagctggagaacggccggaagcggatgctggcctccgccggcgagctgcagaagggcaacgagctggccctgccctccaagtacgtgaacttcctgtacctggcctcccactacgagaagctgaagggctcccccgaggacaacgagcagaagcagctgttcgtggagcagcacaagcactacctggacgagatcatcgagcagatctccgagttctccaagcgggtgatcctggccgacgccaacctggacaaggtgctgtccgcctacaacaagcaccgggacaagcccatccgggagcaggccgagaacatcatccacctgttcaccctgaccaacctgggcgcccccgccgccttcaagtacttcgacaccaccatcgaccggaagcggtacacctccaccaaggaggtgctggacgccaccctgatccaccagtccatcaccggcctgtacgagacccggatcgacctgtcccagctgggcggcgacggcggcggctcccccaagaagaagcggaaggtgtgactagcaccagcctcaagaacacccgaatggagtctctaagctacataataccaacttacactttacaaaatgttgtcccccaaaatgtagccattcgtatctgctcctaataaaaagaaagtttcttcacattctctcgagaaaaaaaaaaaatggaaaaaaaaaaaacggaaaaaaaaaaaaggtaaaaaaaaaaaatataaaaaaaaaaaacataaaaaaaaaaaacgaaaaaaaaaaaacgtaaaaaaaaaaaactcaaaaaaaaaaaagataaaaaaaaaaaacctaaaaaaaaaaaatgtaaaaaaaaaaaagggaaaaaaaaaaaacgcaaaaaaaaaaaacacaaaaaaaaaaaatgcaaaaaaaaaaaatcgaaaaaaaaaaaatctaaaaaaaaaaaacgaaaaaaaaaaaacccaaaaaaaaaaaagacaaaaaaaaaaaatagaaaaaaaaaaaagttaaaaaaaaaaaactgaaaaaaaaaaaatttaaaaaaaaaaaatctag

SEQ ID NO: 2 - RNA, 4782 nt, synthetic construct
  source 1..4782: mol_type = other RNA
atggaggcctcccccgcctccggcccccggcacctgatggacccccacatcttcacctccaacttcaacaacggcatcggccggcacaagacctacctgtgctacgaggtggagcggctggacaacggcacctccgtgaagatggaccagcaccggggcttcctgcacaaccaggccaagaacctgctgtgcggcttctacggccggcacgccgagctgcggttcctggacctggtgccctccctgcagctggaccccgcccagatctaccgggtgacctggttcatctcctggtccccctgcttctcctggggctgcgccggcgaggtgcgggccttcctgcaggagaacacccacgtgcggctgcggatcttcgccgcccggatctacgactacgaccccctgtacaaggaggccctgcagatgctgcgggacgccggcgcccaggtgtccatcatgacctacgacgagttcaagcactgctgggacaccttcgtggaccaccagggctgccccttccagccctgggacggcctggacgagcactcccaggccctgtccggccggctgcgggccatcctgcagaaccagggcaactccggctccgagacccccggcacctccgagtccgccacccccgagtccgacaagaagtactccatcggcctggccatcggcaccaactccgtgggctgggccgtgatcaccgacgagtacaaggtgccctccaagaagttcaaggtgctgggcaacaccgaccggcactccatcaagaagaacctgatcggcgccctgctgttcgactccggcgagaccgccgaggccacccggctgaagcggaccgcccggcggcggtacacccggcggaagaaccggatctgctacctgcaggagatcttctccaacgagatggccaaggtggacgactccttcttccaccggctggaggagtccttcctggtggaggaggacaagaagcacgagcggcaccccatcttcggcaacatcgtggacgaggtggcctaccacgagaagtaccccaccatctaccacctgcggaagaagctggtggactccaccgacaaggccgacctgcggctgatctacctggccctggcccacatgatcaagttccggggccacttcctgatcgagggcgacctgaaccccgacaactccgacgtggacaagctgttcatccagctggtgcagacctacaaccagctgttcgaggagaaccccatcaacgcctccggcgtggacgccaaggccatcctgtccgcccggctgtccaagtcccggcggctggagaacctgatcgcccagctgcccggcgagaagaagaacggcctgttcggcaacctgatcgccctgtccctgggcctgacccccaacttcaagtccaacttcgacctggccgaggacgccaagctgcagctgtccaaggacacctacgacgacgacctggacaacctgctggcccagatcggcgaccagtacgccgacctgttcctggccgccaagaacctgtccgacgccatcctgctgtccgacatcctgcgggtgaacaccgagatcaccaaggcccccctgtccgcctccatgatcaagcggtacgacgagcaccaccaggacctgaccctgctgaaggccctggtgcggcagcagctgcccgagaagtacaaggagatcttcttcgaccagtccaagaacggctacgccggctacatcgacggcggcgcctcccaggaggagttctacaagttcatcaagcccatcctggagaagatggacggcaccgaggagctgctggtgaagctgaaccgggaggacctgctgcggaagcagcggaccttcgacaacggctccatcccccaccagatccacctgggcgagctgcacgccatcctgcggcggcaggaggacttctaccccttcctgaaggacaaccgggagaagatcgagaagatcctgaccttccggatcccctactacgtgggccccctggcccggggcaactcccggttcgcctggatgacccggaagtccgaggagaccatcaccccctggaacttcgaggaggtggtggacaagggcgcctccgcccagtccttcatcgagcggatgaccaacttcgacaagaacctgcccaacgagaaggtgctgcccaagcactccctgctgtacgagtacttcaccgtgtacaacgagctgaccaaggtgaagtacgtgaccgagggcatgcggaagcccgccttcctgtccggcgagcagaagaaggccatcgtggacctgctgttcaagaccaaccggaaggtgaccgtgaagcagctgaaggaggactacttcaagaagatcgagtgcttcgactccgtggagatctccggcgtggaggaccggttcaacgcctccctgggcacctaccacgacctgctgaagatcatcaaggacaaggacttcctggacaacgaggagaacgaggacatcctggaggacatcgtgctgaccctgaccctgttcgaggaccgggagatgatcgaggagcggctgaagacctacgcccacctgttcgacgacaaggtgatgaagcagctgaagcggcggcggtacaccggctggggccggctgtcccggaagctgatcaacggcatccgggacaagcagtccggcaagaccatcctggacttcctgaagtccgacggcttcgccaaccggaacttcatgcagctgatccacgacgactccctgaccttcaaggaggacatccagaaggcccaggtgtccggccagggcgactccctgcacgagcacatcgccaacctggccggctcccccgccatcaagaagggcatcctgcagaccgtgaaggtggtggacgagctggtgaaggtgatgggccggcacaagcccgagaacatcgtgatcgagatggcccgggagaaccagaccacccagaagggccagaagaactcccgggagcggatgaagcggatcgaggagggcatcaaggagctgggctcccagatcctgaaggagcaccccgtggagaacacccagctgcagaacgagaagctgtacctgtactacctgcagaacggccgggacatgtacgtggaccaggagctggacatcaaccggctgtccgactacgacgtggaccacatcgtgccccagtccttcctgaaggacgactccatcgacaacaaggtgctgacccggtccgacaagaaccggggcaagtccgacaacgtgccctccgaggaggtggtgaagaagatgaagaactactggcggcagctgctgaacgccaagctgatcacccagcggaagttcgacaacctgaccaaggccgagcggggcggcctgtccgagctggacaaggccggcttcatcaagcggcagctggtggagacccggcagatcaccaagcacgtggcccagatcctggactcccggatgaacaccaagtacgacgagaacgacaagctgatccgggaggtgaaggtgatcaccctgaagtccaagctggtgtccgacttccggaaggacttccagttctacaaggtgcgggagatcaacaactaccaccacgcccacgacgcctacctgaacgccgtggtgggcaccgccctgatcaagaagtaccccaagctggagtccgagttcgtgtacggcgactacaaggtgtacgacgtgcggaagatgatcgccaagtccgagcaggagatcggcaaggccaccgccaagtacttcttctactccaacatcatgaacttcttcaagaccgagatcaccctggccaacggcgagatccggaagcggcccctgatcgagaccaacggcgagaccggcgagatcgtgtgggacaagggccgggacttcgccaccgtgcggaaggtgctgtccatgccccaggtgaacatcgtgaagaagaccgaggtgcagaccggcggcttctccaaggagtccatcctgcccaagcggaactccgacaagctgatcgcccggaagaaggactgggaccccaagaagtacggcggcttcgactcccccaccgtggcctactccgtgctggtggtggccaaggtggagaagggcaagtccaagaagctgaagtccgtgaaggagctgctgggcatcaccatcatggagcggtcctccttcgagaagaaccccatcgacttcctggaggccaagggctacaaggaggtgaagaaggacctgatcatcaagctgcccaagtactccctgttcgagctggagaacggccggaagcggatgctggcctccgccggcgagctgcagaagggcaacgagctggccctgccctccaagtacgtgaacttcctgtacctggcctcccactacgagaagctgaagggctcccccgaggacaacgagcagaagcagctgttcgtggagcagcacaagcactacctggacgagatcatcgagcagatctccgagttctccaagcgggtgatcctggccgacgccaacctggacaaggtgctgtccgcctacaacaagcaccgggacaagcccatccgggagcaggccgagaacatcatccacctgttcaccctgaccaacctgggcgcccccgccgccttcaagtacttcgacaccaccatcgaccggaagcggtacacctccaccaaggaggtgctggacgccaccctgatccaccagtccatcaccggcctgtacgagacccggatcgacctgtcccagctgggcggcgacggcggcggctcccccaagaagaagcggaaggtgtga

SEQ ID NO: 3 - protein, 1593 aa, synthetic construct
MEASPASGPRHLMDPHIFTSNFNNGIGRHKTYLCYEVERLDNGTSVKMDQHRGFLHNQAKNLLCGFYGRHAELRFLDLVPSLQLDPAQIYRVTWFISWSPCFSWGCAGEVRAFLQENTHVRLRIFAARIYDYDPLYKEALQMLRDAGAQVSIMTYDEFKHCWDTFVDHQGCPFQPWDGLDEHSQALSGRLRAILQNQGNSGSETPGTSESATPESDKKYSIGLAIGTNSVGWAVITDEYKVPSKKFKVLGNTDRHSIKKNLIGALLFDSGETAEATRLKRTARRRYTRRKNRICYLQEIFSNEMAKVDDSFFHRLEESFLVEEDKKHERHPIFGNIVDEVAYHEKYPTIYHLRKKLVDSTDKADLRLIYLALAHMIKFRGHFLIEGDLNPDNSDVDKLFIQLVQTYNQLFEENPINASGVDAKAILSARLSKSRRLENLIAQLPGEKKNGLFGNLIALSLGLTPNFKSNFDLAEDAKLQLSKDTYDDDLDNLLAQIGDQYADLFLAAKNLSDAILLSDILRVNTEITKAPLSASMIKRYDEHHQDLTLLKALVRQQLPEKYKEIFFDQSKNGYAGYIDGGASQEEFYKFIKPILEKMDGTEELLVKLNREDLLRKQRTFDNGSIPHQIHLGELHAILRRQEDFYPFLKDNREKIEKILTFRIPYYVGPLARGNSRFAWMTRKSEETITPWNFEEVVDKGASAQSFIERMTNFDKNLPNEKVLPKHSLLYEYFTVYNELTKVKYVTEGMRKPAFLSGEQKKAIVDLLFKTNRKVTVKQLKEDYFKKIECFDSVEISGVEDRFNASLGTYHDLLKIIKDKDFLDNEENEDILEDIVLTLTLFEDREMIEERLKTYAHLFDDKVMKQLKRRRYTGWGRLSRKLINGIRDKQSGKTILDFLKSDGFANRNFMQLIHDDSLTFKEDIQKAQVSGQGDSLHEHIANLAGSPAIKKGILQTVKVVDELVKVMGRHKPENIVIEMARENQTTQKGQKNSRERMKRIEEGIKELGSQILKEHPVENTQLQNEKLYLYYLQNGRDMYVDQELDINRLSDYDVDHIVPQSFLKDDSIDNKVLTRSDKNRGKSDNVPSEEVVKKMKNYWRQLLNAKLITQRKFDNLTKAERGGLSELDKAGFIKRQLVETRQITKHVAQILDSRMNTKYDENDKLIREVKVITLKSKLVSDFRKDFQFYKVREINNYHHAHDAYLNAVVGTALIKKYPKLESEFVYGDYKVYDVRKMIAKSEQEIGKATAKYFFYSNIMNFFKTEITLANGEIRKRPLIETNGETGEIVWDKGRDFATVRKVLSMPQVNIVKKTEVQTGGFSKESILPKRNSDKLIARKKDWDPKKYGGFDSPTVAYSVLVVAKVEKGKSKKLKSVKELLGITIMERSSFEKNPIDFLEAKGYKEVKKDLIIKLPKYSLFELENGRKRMLASAGELQKGNELALPSKYVNFLYLASHYEKLKGSPEDNEQKQLFVEQHKHYLDEIIEQISEFSKRVILADANLDKVLSAYNKHRDKPIREQAENIIHLFTLTNLGAPAAFKYFDTTIDRKRYTSTKEVLDATLIHQSITGLYETRIDLSQLGGDGGGSPKKKRKV

SEQ ID NO: 4 - RNA, 5399 nt, synthetic construct
  source 1..5399: mol_type = other RNA
gggaagctcagaataaacgctcaactttggccggatctgccaccatggaggcctcccccgcctccggcccccggcacctgatggacccccacatcttcacctccaacttcaacaacggcatcggccggcacaagacctacctgtgctacgaggtggagcggctggacaacggcacctccgtgaagatggaccagcaccggggcttcctgcacaaccaggccaagaacctgctgtgcggcttctacggccggcacgccgagctgcggttcctggacctggtgccctccctgcagctggaccccgcccagatctaccgggtgacctggttcatctcctggtccccctgcttctcctggggctgcgccggcgaggtgcgggccttcctgcaggagaacacccacgtgcggctgcggatcttcgccgcccggatctacgactacgaccccctgtacaaggaggccctgcagatgctgcgggacgccggcgcccaggtgtccatcatgacctacgacgagttcaagcactgctgggacaccttcgtggaccaccagggctgccccttccagccctgggacggcctggacgagcactcccaggccctgtccggccggctgcgggccatcctgcagaaccagggcaactccggctccgagacccccggcacctccgagtccgccacccccgagtccgacaagaagtactccatcggcctggccatcggcaccaactccgtgggctgggccgtgatcaccgacgagtacaaggtgccctccaagaagttcaaggtgctgggcaacaccgaccggcactccatcaagaagaacctgatcggcgccctgctgttcgactccggcgagaccgccgaggccacccggctgaagcggaccgcccggcggcggtacacccggcggaagaaccggatctgctacctgcaggagatcttctccaacgagatggccaaggtggacgactccttcttccaccggctggaggagtccttcctggtggaggaggacaagaagcacgagcggcaccccatcttcggcaacatcgtggacgaggtggcctaccacgagaagtaccccaccatctaccacctgcggaagaagctggtggactccaccgacaaggccgacctgcggctgatctacctggccctggcccacatgatcaagttccggggccacttcctgatcgagggcgacctgaaccccgacaactccgacgtggacaagctgttcatccagctggtgcagacctacaaccagctgttcgaggagaaccccatcaacgcctccggcgtggacgccaaggccatcctgtccgcccggctgtccaagtcccggcggctggagaacctgatcgcccagctgcccggcgagaagaagaacggcctgttcggcaacctgatcgccctgtccctgggcctgacccccaacttcaagtccaacttcgacctggccgaggacgccaagctgcagctgtccaaggacacctacgacgacgacctggacaacctgctggcccagatcggcgaccagtacgccgacctgttcctggccgccaagaacctgtccgacgccatcctgctgtccgacatcctgcgggtgaacaccgagatcaccaaggcccccctgtccgcctccatgatcaagcggtacgacgagcaccaccaggacctgaccctgctgaaggccctggtgcggcagcagctgcccgagaagtacaaggagatcttcttcgaccagtccaagaacggctacgccggctacatcgacggcggcgcctcccaggaggagttctacaagttcatcaagcccatcctggagaagatggacggcaccgaggagctgctggtgaagctgaaccgggaggacctgctgcggaagcagcggaccttcgacaacggctccatcccccaccagatccacctgggcgagctgcacgccatcctgcggcggcaggaggacttctaccccttcctgaaggacaaccgggagaagatcgagaagatcctgaccttccggatcccctactacgtgggccccctggcccggggcaactcccggttcgcctggatgacccggaagtccgaggagaccatcaccccctggaacttcgaggaggtggtggacaagggcgcctccgcccagtccttcatcgagcggatgaccaacttcgacaagaacctgcccaacgagaaggtgctgcccaagcactccctgctgtacgagtacttcaccgtgtacaacgagctgaccaaggtgaagtacgtgaccgagggcatgcggaagcccgccttcctgtccggcgagcagaagaaggccatcgtggacctgctgttcaagaccaaccggaaggtgaccgtgaagcagctgaaggaggactacttcaagaagatcgagtgcttcgactccgtggagatctccggcgtggaggaccggttcaacgcctccctgggcacctaccacgacctgctgaagatcatcaaggacaaggacttcctggacaacgaggagaacgaggacatcctggaggacatcgtgctgaccctgaccctgttcgaggaccgggagatgatcgaggagcggctgaagacctacgcccacctgttcgacgacaaggtgatgaagcagctgaagcggcggcggtacaccggctggggccggctgtcccggaagctgatcaacggcatccgggacaagcagtccggcaagaccatcctggacttcctgaagtccgacggcttcgccaaccggaacttcatgcagctgatccacgacgactccctgaccttcaaggaggacatccagaaggcccaggtgtccggccagggcgactccctgcacgagcacatcgccaacctggccggctcccccgccatcaagaagggcatcctgcagaccgtgaaggtggtggacgagctggtgaaggtgatgggccggcacaagcccgagaacatcgtgatcgagatggcccgggagaaccagaccacccagaagggccagaagaactcccgggagcggatgaagcggatcgaggagggcatcaaggagctgggctcccagatcctgaaggagcaccccgtggagaacacccagctgcagaacgagaagctgtacctgtactacctgcagaacggccgggacatgtacgtggaccaggagctggacatcaaccggctgtccgactacgacgtggaccacatcgtgccccagtccttcctgaaggacgactccatcgacaacaaggtgctgacccggtccgacaagaaccggggcaagtccgacaacgtgccctccgaggaggtggtgaagaagatgaagaactactggcggcagctgctgaacgccaagctgatcacccagcggaagttcgacaacctgaccaaggccgagcggggcggcctgtccgagctggacaaggccggcttcatcaagcggcagctggtggagacccggcagatcaccaagcacgtggcccagatcctggactcccggatgaacaccaagtacgacgagaacgacaagctgatccgggaggtgaaggtgatcaccctgaagtccaagctggtgtccgacttccggaaggacttccagttctacaaggtgcgggagatcaacaactaccaccacgcccacgacgcctacctgaacgccgtggtgggcaccgccctgatcaagaagtaccccaagctggagtccgagttcgtgtacggcgactacaaggtgtacgacgtgcggaagatgatcgccaagtccgagcaggagatcggcaaggccaccgccaagtacttcttctactccaacatcatgaacttcttcaagaccgagatcaccctggccaacggcgagatccggaagcggcccctgatcgagaccaacggcgagaccggcgagatcgtgtgggacaagggccgggacttcgccaccgtgcggaaggtgctgtccatgccccaggtgaacatcgtgaagaagaccgaggtgcagaccggcggcttctccaaggagtccatcctgcccaagcggaactccgacaagctgatcgcccggaagaaggactgggaccccaagaagtacggcggcttcgactcccccaccgtggcctactccgtgctggtggtggccaaggtggagaagggcaagtccaagaagctgaagtccgtgaaggagctgctgggcatcaccatcatggagcggtcctccttcgagaagaaccccatcgacttcctggaggccaagggctacaaggaggtgaagaaggacctgatcatcaagctgcccaagtactccctgttcgagctggagaacggccggaagcggatgctggcctccgccggcgagctgcagaagggcaacgagctggccctgccctccaagtacgtgaacttcctgtacctggcctcccactacgagaagctgaagggctcccccgaggacaacgagcagaagcagctgttcgtggagcagcacaagcactacctggacgagatcatcgagcagatctccgagttctccaagcgggtgatcctggccgacgccaacctggacaaggtgctgtccgcctacaacaagcaccgggacaagcccatccgggagcaggccgagaacatcatccacctgttcaccctgaccaacctgggcgcccccgccgccttcaagtacttcgacaccaccatcgaccggaagcggtacacctccaccaaggaggtgctggacgccaccctgatccaccagtccatcaccggcctgtacgagacccggatcgacctgtcccagctgggcggcgacggcggcggctcccccaagaagaagcggaaggtgtccgagtccgccacccccgagtccgtgtccggctggcggctgttcaagaagatctcctgactagcaccagcctcaagaacacccgaatggagtctctaagctacataataccaacttacactttacaaaatgttgtcccccaaaatgtagccattcgtatctgctcctaataaaaagaaagtttcttcacattctctcgagaaaaaaaaaaaatggaaaaaaaaaaaacggaaaaaaaaaaaaggtaaaaaaaaaaaatataaaaaaaaaaaacataaaaaaaaaaaacgaaaaaaaaaaaacgtaaaaaaaaaaaactcaaaaaaaaaaaagataaaaaaaaaaaacctaaaaaaaaaaaatgtaaaaaaaaaaaagggaaaaaaaaaaaacgcaaaaaaaaaaaacacaaaaaaaaaaaatgcaaaaaaaaaaaatcgaaaaaaaaaaaatctaaaaaaaaaaaacgaaaaaaaaaaaacccaaaaaaaaaaaagacaaaaaaaaaaaatagaaaaaaaaaaaagttaaaaaaaaaaaactgaaaaaaaaaaaatttaaaaaaaaaaaatctag

SEQ ID NO: 5 - RNA, 4839 nt, synthetic construct
  source 1..4839: mol_type = other RNA
atggaggcctcccccgcctccggcccccggcacctgatggacccccacatcttcacctccaacttcaacaacggcatcggccggcacaagacctacctgtgctacgaggtggagcggctggacaacggcacctccgtgaagatggaccagcaccggggcttcctgcacaaccaggccaagaacctgctgtgcggcttctacggccggcacgccgagctgcggttcctggacctggtgccctccctgcagctggaccccgcccagatctaccgggtgacctggttcatctcctggtccccctgcttctcctggggctgcgccggcgaggtgcgggccttcctgcaggagaacacccacgtgcggctgcggatcttcgccgcccggatctacgactacgaccccctgtacaaggaggccctgcagatgctgcgggacgccggcgcccaggtgtccatcatgacctacgacgagttcaagcactgctgggacaccttcgtggaccaccagggctgccccttccagccctgggacggcctggacgagcactcccaggccctgtccggccggctgcgggccatcctgcagaaccagggcaactccggctccgagacccccggcacctccgagtccgccacccccgagtccgacaagaagtactccatcggcctggccatcggcaccaactccgtgggctgggccgtgatcaccgacgagtacaaggtgccctccaagaagttcaaggtgctgggcaacaccgaccggcactccatcaagaagaacctgatcggcgccctgctgttcgactccggcgagaccgccgaggccacccggctgaagcggaccgcccggcggcggtacacccggcggaagaaccggatctgctacctgcaggagatcttctccaacgagatggccaaggtggacgactccttcttccaccggctggaggagtccttcctggtggaggaggacaagaagcacgagcggcaccccatcttcggcaacatcgtggacgaggtggcctaccacgagaagtaccccaccatctaccacctgcggaagaagctggtggactccaccgacaaggccgacctgcggctgatctacctggccctggcccacatgatcaagttccggggccacttcctgatcgagggcgacctgaaccccgacaactccgacgtggacaagctgttcatccagctggtgcagacctacaaccagctgttcgaggagaaccccatcaacgcctccggcgtggacgccaaggccatcctgtccgcccggctgtccaagtcccggcggctggagaacctgatcgcccagctgcccggcgagaagaagaacggcctgttcggcaacctgatcgccctgtccctgggcctgacccccaacttcaagtccaacttcgacctggccgaggacgccaagctgcagctgtccaaggacacctacgacgacgacctggacaacctgctggcccagatcggcgaccagtacgccgacctgttcctggccgccaagaacctgtccgacgccatcctgctgtccgacatcctgcgggtgaacaccgagatcaccaaggcccccctgtccgcctccatgatcaagcggtacgacgagcaccaccaggacctgaccctgctgaaggccctggtgcggcagcagctgcccgagaagtacaaggagatcttcttcgaccagtccaagaacggctacgccggctacatcgacggcggcgcctcccaggaggagttctacaagttcatcaagcccatcctggagaagatggacggcaccgaggagctgctggtgaagctgaaccgggaggacctgctgcggaagcagcggaccttcgacaacggctccatcccccaccagatccacctgggcgagctgcacgccatcctgcggcggcaggaggacttctaccccttcctgaaggacaaccgggagaagatcgagaagatcctgaccttccggatcccctactacgtgggccccctggcccggggcaactcccggttcgcctggatgacccggaagtccgaggagaccatcaccccctggaacttcgaggaggtggtggacaagggcgcctccgcccagtccttcatcgagcggatgaccaacttcgacaagaacctgcccaacgagaaggtgctgcccaagcactccctgctgtacgagtacttcaccgtgtacaacgagctgaccaaggtgaagtacgtgaccgagggcatgcggaagcccgccttcctgtccggcgagcagaagaaggccatcgtggacctgctgttcaagaccaaccggaaggtgaccgtgaagcagctgaaggaggactacttcaagaagatcgagtgcttcgactccgtggagatctccggcgtggaggaccggttcaacgcctccctgggcacctaccacgacctgctgaagatcatcaaggacaaggacttcctggacaacgaggagaacgaggacatcctggaggacatcgtgctgaccctgaccctgttcgaggaccgggagatgatcgaggagcggctgaagacctacgcccacctgttcgacgacaaggtgatgaagcagctgaagcggcggcggtacaccggctggggccggctgtcccggaagctgatcaacggcatccgggacaagcagtccggcaagaccatcctggacttcctgaagtccgacggcttcgccaaccggaacttcatgcagctgatccacgacgactccctgaccttcaaggaggacatccagaaggcccaggtgtccggccagggcgactccctgcacgagcacatcgccaacctggccggctcccccgccatcaagaagggcatcctgcagaccgtgaaggtggtggacgagctggtgaaggtgatgggccggcacaagcccgagaacatcgtgatcgagatggcccgggagaaccagaccacccagaagggccagaagaactcccgggagcggatgaagcggatcgaggagggcatcaaggagctgggctcccagatcctgaaggagcaccccgtggagaacacccagctgcagaacgagaagctgtacctgtactacctgcagaacggccgggacatgtacgtggaccaggagctggacatcaaccggctgtccgactacgacgtggaccacatcgtgccccagtccttcctgaaggacgactccatcgacaacaaggtgctgacccggtccgacaagaaccggggcaagtccgacaacgtgccctccgaggaggtggtgaagaagatgaagaactactggcggcagctgctgaacgccaagctgatcacccagcggaagttcgacaacctgaccaaggccgagcggggcggcctgtccgagctggacaaggccggcttcatcaagcggcagctggtggagacccggcagatcaccaagcacgtggcccagatcctggactcccggatgaacaccaagtacgacgagaacgacaagctgatccgggaggtgaaggtgatcaccctgaagtccaagctggtgtccgacttccggaaggacttccagttctacaaggtgcgggagatcaacaactaccaccacgcccacgacgcctacctgaacgccgtggtgggcaccgccctgatcaagaagtaccccaagctggagtccgagttcgtgtacggcgactacaaggtgtacgacgtgcggaagatgatcgccaagtccgagcaggagatcggcaaggccaccgccaagtacttcttctactccaacatcatgaacttcttcaagaccgagatcaccctggccaacggcgagatccggaagcggcccctgatcgagaccaacggcgagaccggcgagatcgtgtgggacaagggccgggacttcgccaccgtgcggaaggtgctgtccatgccccaggtgaacatcgtgaagaagaccgaggtgcagaccggcggcttctccaaggagtccatcctgcccaagcggaactccgacaagctgatcgcccggaagaaggactgggaccccaagaagtacggcggcttcgactcccccaccgtggcctactccgtgctggtggtggccaaggtggagaagggcaagtccaagaagctgaagtccgtgaaggagctgctgggcatcaccatcatggagcggtcctccttcgagaagaaccccatcgacttcctggaggccaagggctacaaggaggtgaagaaggacctgatcatcaagctgcccaagtactccctgttcgagctggagaacggccggaagcggatgctggcctccgccggcgagctgcagaagggcaacgagctggccctgccctccaagtacgtgaacttcctgtacctggcctcccactacgagaagctgaagggctcccccgaggacaacgagcagaagcagctgttcgtggagcagcacaagcactacctggacgagatcatcgagcagatctccgagttctccaagcgggtgatcctggccgacgccaacctggacaaggtgctgtccgcctacaacaagcaccgggacaagcccatccgggagcaggccgagaacatcatccacctgttcaccctgaccaacctgggcgcccccgccgccttcaagtacttcgacaccaccatcgaccggaagcggtacacctccaccaaggaggtgctggacgccaccctgatccaccagtccatcaccggcctgtacgagacccggatcgacctgtcccagctgggcggcgacggcggcggctcccccaagaagaagcggaaggtgtccgagtccgccacccccgagtccgtgtccggctggcggctgttcaagaagatctcctga

SEQ ID NO: 6 - protein, 1612 aa, synthetic construct
MEASPASGPRHLMDPHIFTSNFNNGIGRHKTYLCYEVERLDNGTSVKMDQHRGFLHNQAKNLLCGFYGRHAELRFLDLVPSLQLDPAQIYRVTWFISWSPCFSWGCAGEVRAFLQENTHVRLRIFAARIYDYDPLYKEALQMLRDAGAQVSIMTYDEFKHCWDTFVDHQGCPFQPWDGLDEHSQALSGRLRAILQNQGNSGSETPGTSESATPESDKKYSIGLAIGTNSVGWAVITDEYKVPSKKFKVLGNTDRHSIKKNLIGALLFDSGETAEATRLKRTARRRYTRRKNRICYLQEIFSNEMAKVDDSFFHRLEESFLVEEDKKHERHPIFGNIVDEVAYHEKYPTIYHLRKKLVDSTDKADLRLIYLALAHMIKFRGHFLIEGDLNPDNSDVDKLFIQLVQTYNQLFEENPINASGVDAKAILSARLSKSRRLENLIAQLPGEKKNGLFGNLIALSLGLTPNFKSNFDLAEDAKLQLSKDTYDDDLDNLLAQIGDQYADLFLAAKNLSDAILLSDILRVNTEITKAPLSASMIKRYDEHHQDLTLLKALVRQQLPEKYKEIFFDQSKNGYAGYIDGGASQEEFYKFIKPILEKMDGTEELLVKLNREDLLRKQRTFDNGSIPHQIHLGELHAILRRQEDFYPFLKDNREKIEKILTFRIPYYVGPLARGNSRFAWMTRKSEETITPWNFEEVVDKGASAQSFIERMTNFDKNLPNEKVLPKHSLLYEYFTVYNELTKVKYVTEGMRKPAFLSGEQKKAIVDLLFKTNRKVTVKQLKEDYFKKIECFDSVEISGVEDRFNASLGTYHDLLKIIKDKDFLDNEENEDILEDIVLTLTLFEDREMIEERLKTYAHLFDDKVMKQLKRRRYTGWGRLSRKLINGIRDKQSGKTILDFLKSDGFANRNFMQLIHDDSLTFKEDIQKAQVSGQGDSLHEHIANLAGSPAIKKGILQTVKVVDELVKVMGRHKPENIVIEMARENQTTQKGQKNSRERMKRIEEGIKELGSQILKEHPVENTQLQNEKLYLYYLQNGRDMYVDQELDINRLSDYDVDHIVPQSFLKDDSIDNKVLTRSDKNRGKSDNVPSEEVVKKMKNYWRQLLNAKLITQRKFDNLTKAERGGLSELDKAGFIKRQLVETRQITKHVAQILDSRMNTKYDENDKLIREVKVITLKSKLVSDFRKDFQFYKVREINNYHHAHDAYLNAVVGTALIKKYPKLESEFVYGDYKVYDVRKMIAKSEQEIGKATAKYFFYSNIMNFFKTEITLANGEIRKRPLIETNGETGEIVWDKGRDFATVRKVLSMPQVNIVKKTEVQTGGFSKESILPKRNSDKLIARKKDWDPKKYGGFDSPTVAYSVLVVAKVEKGKSKKLKSVKELLGITIMERSSFEKNPIDFLEAKGYKEVKKDLIIKLPKYSLFELENGRKRMLASAGELQKGNELALPSKYVNFLYLASHYEKLKGSPEDNEQKQLFVEQHKHYLDEIIEQISEFSKRVILADANLDKVLSAYNKHRDKPIREQAENIIHLFTLTNLGAPAAFKYFDTTIDRKRYTSTKEVLDATLIHQSITGLYETRIDLSQLGGDGGGSPKKKRKVSESATPESVSGWRLFKKIS

SEQ ID NO: 7 - RNA, 5548 nt, synthetic construct
  source 1..5548: mol_type = other RNA
gggagacccaagctggctagcgtttaaacttaagctttcccgcagtcggcgtccagcggctctgcttgttcgtgtgtgtgtcgttgcaggccttattcggatccgccaccatgagcagcgaaacaggaccggtcgcagtcgacccgacactgagaagaagaatcgaaccgcacgaattcgaagtcttcttcgacccgagagaactgagaaaggaaacatgcctgctgtacgaaatcaactggggaggaagacacagcatctggagacacacaagccagaacacaaacaagcacgtcgaagtcaacttcatcgaaaagttcacaacagaaagatacttctgcccgaacacaagatgcagcatcacatggttcctgagctggagcccgtgcggagaatgcagcagagcaatcacagaattcctgagcagatacccgcacgtcacactgttcatctacatcgcaagactgtaccaccacgcagacccgagaaacagacagggactgagagacctgatcagcagcggagtcacaatccagatcatgacagaacaggaaagcggatactgctggagaaacttcgtcaactacagcccgagcaacgaagcacactggccgagatacccgcacctgtgggtcagactgtacgtcctggaactgtactgcatcatcctgggactgccgccgtgcctgaacatcctgagaagaaagcagccgcagctgacattcttcacaatcgcactgcagagctgccactaccagagactgccgccgcacatcctgtgggcaacaggactgaagagcggaagcgaaacaccgggaacaagcgaaagcgcaacaccggaaagcgacaagaagtacagcatcggactggccatcggaacaaacagcgtcggatgggcagtcatcacagacgaatacaaggtcccgagcaagaagttcaaggtcctgggaaacacagacagacacagcatcaagaagaacctgatcggagcactgctgttcgacagcggagaaacagcagaagcaacaagactgaagagaacagcaagaagaagatacacaagaagaaagaacagaatctgctacctgcaggaaatcttcagcaacgaaatggcaaaggtcgacgacagcttcttccacagactggaagaaagcttcctggtcgaagaagacaagaagcacgaaagacacccgatcttcggaaacatcgtcgacgaagtcgcataccacgaaaagtacccgacaatctaccacctgagaaagaagctggtcgacagcacagacaaggcagacctgagactgatctacctggcactggcacacatgatcaagttcagaggacacttcctgatcgaaggagacctgaacccggacaacagcgacgtcgacaagctgttcatccagctggtccagacatacaaccagctgttcgaagaaaacccgatcaacgcaagcggagtcgacgcaaaggcaatcctgagcgcaagactgagcaagagcagaagactggaaaacctgatcgcacagctgccgggagaaaagaagaacggactgttcggaaacctgatcgcactgagcctgggactgacaccgaacttcaagagcaacttcgacctggcagaagacgcaaagctgcagctgagcaaggacacatacgacgacgacctggacaacctgctggcacagatcggagaccagtacgcagacctgttcctggcagcaaagaacctgagcgacgcaatcctgctgagcgacatcctgagagtcaacacagaaatcacaaaggcaccgctgagcgcaagcatgatcaagagatacgacgaacaccaccaggacctgacactgctgaaggcactggtcagacagcagctgccggaaaagtacaaggaaatcttcttcgaccagagcaagaacggatacgcaggatacatcgacggaggagcaagccaggaagaattctacaagttcatcaagccgatcctggaaaagatggacggaacagaagaactgctggtcaagctgaacagagaagacctgctgagaaagcagagaacattcgacaacggaagcatcccgcaccagatccacctgggagaactgcacgcaatcctgagaagacaggaagacttctacccgttcctgaaggacaacagagaaaagatcgaaaagatcctgacattcagaatcccgtactacgtcggaccgctggcaagaggaaacagcagattcgcatggatgacaagaaagagcgaagaaacaatcacaccgtggaacttcgaagaagtcgtcgacaagggagcaagcgcacagagcttcatcgaaagaatgacaaacttcgacaagaacctgccgaacgaaaaggtcctgccgaagcacagcctgctgtacgaatacttcacagtctacaacgaactgacaaaggtcaagtacgtcacagaaggaatgagaaagccggcattcctgagcggagaacagaagaaggcaatcgtcgacctgctgttcaagacaaacagaaaggtcacagtcaagcagctgaaggaagactacttcaagaagatcgaatgcttcgacagcgtcgaaatcagcggagtcgaagacagattcaacgcaagcctgggaacataccacgacctgctgaagatcatcaaggacaaggacttcctggacaacgaagaaaacgaagacatcctggaagacatcgtcctgacactgacactgttcgaagacagagaaatgatcgaagaaagactgaagacatacgcacacctgttcgacgacaaggtcatgaagcagctgaagagaagaagatacacaggatggggaagactgagcagaaagctgatcaacggaatcagagacaagcagagcggaaagacaatcctggacttcctgaagagcgacggattcgcaaacagaaacttcatgcagctgatccacgacgacagcctgacattcaaggaagacatccagaaggcacaggtcagcggacagggagacagcctgcacgaacacatcgcaaacctggcaggaagcccggcaatcaagaagggaatcctgcagacagtcaaggtcgtcgacgaactggtcaaggtcatgggaagacacaagccggaaaacatcgtcatcgaaatggcaagagaaaaccagacaacacagaagggacagaagaacagcagagaaagaatgaagagaatcgaagaaggaatcaaggaactgggaagccagatcctgaaggaacacccggtcgaaaacacacagctgcagaacgaaaagctgtacctgtactacctgcagaacggaagagacatgtacgtcgaccaggaactggacatcaacagactgagcgactacgacgtcgaccacatcgtcccgcagagcttcctgaaggacgacagcatcgacaacaaggtcctgacaagaagcgacaagaacagaggaaagagcgacaacgtcccgagcgaagaagtcgtcaagaagatgaagaactactggagacagctgctgaacgcaaagctgatcacacagagaaagttcgacaacctgacaaaggcagagagaggaggactgagcgaactggacaaggcaggattcatcaagagacagctggtcgaaacaagacagatcacaaagcacgtcgcacagatcctggacagcagaatgaacacaaagtacgacgaaaacgacaagctgatcagagaagtcaaggtcatcacactgaagagcaagctggtcagcgacttcagaaaggacttccagttctacaaggtcagagaaatcaacaactaccaccacgcacacgacgcatacctgaacgcagtcgtcggaacagcactgatcaagaagtacccgaagctggaaagcgaattcgtctacggagactacaaggtctacgacgtcagaaagatgatcgcaaagagcgaacaggaaatcggaaaggcaacagcaaagtacttcttctacagcaacatcatgaacttcttcaagacagaaatcacactggcaaacggagaaatcagaaagagaccgctgatcgaaacaaacggagaaacaggagaaatcgtctgggacaagggaagagacttcgcaacagtcagaaaggtcctgagcatgccgcaggtcaacatcgtcaagaagacagaagtccagacaggaggattcagcaaggaaagcatcctgccgaagagaaacagcgacaagctgatcgcaagaaagaaggactgggacccgaagaagtacggaggattcgacagcccgacagtcgcatacagcgtcctggtcgtcgcaaaggtcgaaaagggaaagagcaagaagctgaagagcgtcaaggaactgctgggaatcacaatcatggaaagaagcagcttcgaaaagaacccgatcgacttcctggaagcaaagggatacaaggaagtcaagaaggacctgatcatcaagctgccgaagtacagcctgttcgaactggaaaacggaagaaagagaatgctggcaagcgcaggagaactgcagaagggaaacgaactggcactgccgagcaagtacgtcaacttcctgtacctggcaagccactacgaaaagctgaagggaagcccggaagacaacgaacagaagcagctgttcgtcgaacagcacaagcactacctggacgaaatcatcgaacagatcagcgaattcagcaagagagtcatcctggcagacgcaaacctggacaaggtcctgagcgcatacaacaagcacagagacaagccgatcagagaacaggcagaaaacatcatccacctgttcacactgacaaacctgggagcaccggcagcattcaagtacttcgacacaacaatcgacagaaagagatacacaagcacaaaggaagtcctggacgcaacactgatccaccagagcatcacaggactgtacgaaacaagaatcgatctgagccagctgggaggagacagcggaggaagcacaaacctgagcgacatcatcgaaaaggaaacaggaaagcagctggtcatccaggaaagcatcctgatgctgccggaagaagtcgaagaagtcatcggaaacaagccggaaagcgacatcctggtccacacagcatacgacgaaagcacagacgaaaacgtcatgctgctgacaagcgacgcaccggaatacaagccgtgggcactggtcatccaggacagcaacggagaaaacaagatcaagatgctgagcggaggaagcccgaagaagaagagaaaggtctaatagtctagacatcacatttaaaagcatctcagcctaccatgagaataagagaaagaaaatgaagatcaatagcttattcatctctttttctttttcgttggtgtaaagccaacaccctgtctaaaaaacataaatttctttaatcattttgcctcttttctctgtgcttcaattaataaaaaatggaaagaacctcgagaaaaaaaaaaaaaaaaaaaaaaaaaaaaaagcgaaaaaaaaaaaaaaaaaaaaaaaaaaaaaaccgaaaaaaaaaaaaaaaaaaaaaaaaaaaaaaaaaaaaaaat

SEQ ID NO: 8 - RNA, 5130 nt, synthetic construct
  source 1..5130: mol_type = other RNA
atgagcagcgaaacaggaccggtcgcagtcgacccgacactgagaagaagaatcgaaccgcacgaattcgaagtcttcttcgacccgagagaactgagaaaggaaacatgcctgctgtacgaaatcaactggggaggaagacacagcatctggagacacacaagccagaacacaaacaagcacgtcgaagtcaacttcatcgaaaagttcacaacagaaagatacttctgcccgaacacaagatgcagcatcacatggttcctgagctggagcccgtgcggagaatgcagcagagcaatcacagaattcctgagcagatacccgcacgtcacactgttcatctacatcgcaagactgtaccaccacgcagacccgagaaacagacagggactgagagacctgatcagcagcggagtcacaatccagatcatgacagaacaggaaagcggatactgctggagaaacttcgtcaactacagcccgagcaacgaagcacactggccgagatacccgcacctgtgggtcagactgtacgtcctggaactgtactgcatcatcctgggactgccgccgtgcctgaacatcctgagaagaaagcagccgcagctgacattcttcacaatcgcactgcagagctgccactaccagagactgccgccgcacatcctgtgggcaacaggactgaagagcggaagcgaaacaccgggaacaagcgaaagcgcaacaccggaaagcgacaagaagtacagcatcggactggccatcggaacaaacagcgtcggatgggcagtcatcacagacgaatacaaggtcccgagcaagaagttcaaggtcctgggaaacacagacagacacagcatcaagaagaacctgatcggagcactgctgttcgacagcggagaaacagcagaagcaacaagactgaagagaacagcaagaagaagatacacaagaagaaagaacagaatctgctacctgcaggaaatcttcagcaacgaaatggcaaaggtcgacgacagcttcttccacagactggaagaaagcttcctggtcgaagaagacaagaagcacgaaagacacccgatcttcggaaacatcgtcgacgaagtcgcataccacgaaaagtacccgacaatctaccacctgagaaagaagctggtcgacagcacagacaaggcagacctgagactgatctacctggcactggcacacatgatcaagttcagaggacacttcctgatcgaaggagacctgaacccggacaacagcgacgtcgacaagctgttcatccagctggtccagacatacaaccagctgttcgaagaaaacccgatcaacgcaagcggagtcgacgcaaaggcaatcctgagcgcaagactgagcaagagcagaagactggaaaacctgatcgcacagctgccgggagaaaagaagaacggactgttcggaaacctgatcgcactgagcctgggactgacaccgaacttcaagagcaacttcgacctggcagaagacgcaaagctgcagctgagcaaggacacatacgacgacgacctggacaacctgctggcacagatcggagaccagtacgcagacctgttcctggcagcaaagaacctgagcgacgcaatcctgctgagcgacatcctgagagtcaacacagaaatcacaaaggcaccgctgagcgcaagcatgatcaagagatacgacgaacaccaccaggacctgacactgctgaaggcactggtcagacagcagctgccggaaaagtacaaggaaatcttcttcgaccagagcaagaacggatacgcaggatacatcgacggaggagcaagccaggaagaattctacaagttcatcaagccgatcctggaaaagatggacggaacagaagaactgctggtcaagctgaacagagaagacctgctgagaaagcagagaacattcgacaacggaagcatcccgcaccagatccacctgggagaactgcacgcaatcctgagaagacaggaagacttctacccgttcctgaaggacaacagagaaaagatcgaaaagatcctgacattcagaatcccgtactacgtcggaccgctggcaagaggaaacagcagattcgcatggatgacaagaaagagcgaagaaacaatcacaccgtggaacttcgaagaagtcgtcgacaagggagcaagcgcacagagcttcatcgaaagaatgacaaacttcgacaagaacctgccgaacgaaaaggtcctgccgaagcacagcctgctgtacgaatacttcacagtctacaacgaactgacaaaggtcaagtacgtcacagaaggaatgagaaagccggcattcctgagcggagaacagaagaaggcaatcgtcgacctgctgttcaagacaaacagaaaggtcacagtcaagcagctgaaggaagactacttcaagaagatcgaatgcttcgacagcgtcgaaatcagcggagtcgaagacagattcaacgcaagcctgggaacataccacgacctgctgaagatcatcaaggacaaggacttcctggacaacgaagaaaacgaagacatcctggaagacatcgtcctgacactgacactgttcgaagacagagaaatgatcgaagaaagactgaagacatacgcacacctgttcgacgacaaggtcatgaagcagctgaagagaagaagatacacaggatggggaagactgagcagaaagctgatcaacggaatcagagacaagcagagcggaaagacaatcctggacttcctgaagagcgacggattcgcaaacagaaacttcatgcagctgatccacgacgacagcctgacattcaaggaagacatccagaaggcacaggtcagcggacagggagacagcctgcacgaacacatcgcaaacctggcaggaagcccggcaatcaagaagggaatcctgcagacagtcaaggtcgtcgacgaactggtcaaggtcatgggaagacacaagccggaaaacatcgtcatcgaaatggcaagagaaaaccagacaacacagaagggacagaagaacagcagagaaagaatgaagagaatcgaagaaggaatcaaggaactgggaagccagatcctgaaggaacacccggtcgaaaacacacagctgcagaacgaaaagctgtacctgtactacctgcagaacggaagagacatgtacgtcgaccaggaactggacatcaacagactgagcgactacgacgtcgaccacatcgtcccgcagagcttcctgaaggacgacagcatcgacaacaaggtcctgacaagaagcgacaagaacagaggaaagagcgacaacgtcccgagcgaagaagtcgtcaagaagatgaagaactactggagacagctgctgaacgcaaagctgatcacacagagaaagttcgacaacctgacaaaggcagagagaggaggactgagcgaactggacaaggcaggattcatcaagagacagctggtcgaaacaagacagatcacaaagcacgtcgcacagatcctggacagcagaatgaacacaaagtacgacgaaaacgacaagctgatcagagaagtcaaggtcatcacactgaagagcaagctggtcagcgacttcagaaaggacttccagttctacaaggtcagagaaatcaacaactaccaccacgcacacgacgcatacctgaacgcagtcgtcggaacagcactgatcaagaagtacccgaagctggaaagcgaattcgtctacggagactacaaggtctacgacgtcagaaagatgatcgcaaagagcgaacaggaaatcggaaaggcaacagcaaagtacttcttctacagcaacatcatgaacttcttcaagacagaaatcacactggcaaacggagaaatcagaaagagaccgctgatcgaaacaaacggagaaacaggagaaatcgtctgggacaagggaagagacttcgcaacagtcagaaaggtcctgagcatgccgcaggtcaacatcgtcaagaagacagaagtccagacaggaggattcagcaaggaaagcatcctgccgaagagaaacagcgacaagctgatcgcaagaaagaaggactgggacccgaagaagtacggaggattcgacagcccgacagtcgcatacagcgtcctggtcgtcgcaaaggtcgaaaagggaaagagcaagaagctgaagagcgtcaaggaactgctgggaatcacaatcatggaaagaagcagcttcgaaaagaacccgatcgacttcctggaagcaaagggatacaaggaagtcaagaaggacctgatcatcaagctgccgaagtacagcctgttcgaactggaaaacggaagaaagagaatgctggcaagcgcaggagaactgcagaagggaaacgaactggcactgccgagcaagtacgtcaacttcctgtacctggcaagccactacgaaaagctgaagggaagcccggaagacaacgaacagaagcagctgttcgtcgaacagcacaagcactacctggacgaaatcatcgaacagatcagcgaattcagcaagagagtcatcctggcagacgcaaacctggacaaggtcctgagcgcatacaacaagcacagagacaagccgatcagagaacaggcagaaaacatcatccacctgttcacactgacaaacctgggagcaccggcagcattcaagtacttcgacacaacaatcgacagaaagagatacacaagcacaaaggaagtcctggacgcaacactgatccaccagagcatcacaggactgtacgaaacaagaatcgatctgagccagctgggaggagacagcggaggaagcacaaacctgagcgacatcatcgaaaaggaaacaggaaagcagctggtcatccaggaaagcatcctgatgctgccggaagaagtcgaagaagtcatcggaaacaagccggaaagcgacatcctggtccacacagcatacgacgaaagcacagacgaaaacgtcatgctgctgacaagcgacgcaccggaatacaagccgtgggcactggtcatccaggacagcaacggagaaaacaagatcaagatgctgagcggaggaagcccgaagaagaagagaaaggtc

SEQ ID NO: 9 - protein, 1710 aa, synthetic construct
MSSETGPVAVDPTLRRRIEPHEFEVFFDPRELRKETCLLYEINWGGRHSIWRHTSQNTNKHVEVNFIEKFTTERYFCPNTRCSITWFLSWSPCGECSRAITEFLSRYPHVTLFIYIARLYHHADPRNRQGLRDLISSGVTIQIMTEQESGYCWRNFVNYSPSNEAHWPRYPHLWVRLYVLELYCIILGLPPCLNILRRKQPQLTFFTIALQSCHYQRLPPHILWATGLKSGSETPGTSESATPESDKKYSIGLAIGTNSVGWAVITDEYKVPSKKFKVLGNTDRHSIKKNLIGALLFDSGETAEATRLKRTARRRYTRRKNRICYLQEIFSNEMAKVDDSFFHRLEESFLVEEDKKHERHPIFGNIVDEVAYHEKYPTIYHLRKKLVDSTDKADLRLIYLALAHMIKFRGHFLIEGDLNPDNSDVDKLFIQLVQTYNQLFEENPINASGVDAKAILSARLSKSRRLENLIAQLPGEKKNGLFGNLIALSLGLTPNFKSNFDLAEDAKLQLSKDTYDDDLDNLLAQIGDQYADLFLAAKNLSDAILLSDILRVNTEITKAPLSASMIKRYDEHHQDLTLLKALVRQQLPEKYKEIFFDQSKNGYAGYIDGGASQEEFYKFIKPILEKMDGTEELLVKLNREDLLRKQRTFDNGSIPHQIHLGELHAILRRQEDFYPFLKDNREKIEKILTFRIPYYVGPLARGNSRFAWMTRKSEETITPWNFEEVVDKGASAQSFIERMTNFDKNLPNEKVLPKHSLLYEYFTVYNELTKVKYVTEGMRKPAFLSGEQKKAIVDLLFKTNRKVTVKQLKEDYFKKIECFDSVEISGVEDRFNASLGTYHDLLKIIKDKDFLDNEENEDILEDIVLTLTLFEDREMIEERLKTYAHLFDDKVMKQLKRRRYTGWGRLSRKLINGIRDKQSGKTILDFLKSDGFANRNFMQLIHDDSLTFKEDIQKAQVSGQGDSLHEHIANLAGSPAIKKGILQTVKVVDELVKVMGRHKPENIVIEMARENQTTQKGQKNSRERMKRIEEGIKELGSQILKEHPVENTQLQNEKLYLYYLQNGRDMYVDQELDINRLSDYDVDHIVPQSFLKDDSIDNKVLTRSDKNRGKSDNVPSEEVVKKMKNYWRQLLNAKLITQRKFDNLTKAERGGLSELDKAGFIKRQLVETRQITKHVAQILDSRMNTKYDENDKLIREVKVITLKSKLVSDFRKDFQFYKVREINNYHHAHDAYLNAVVGTALIKKYPKLESEFVYGDYKVYDVRKMIAKSEQEIGKATAKYFFYSNIMNFFKTEITLANGEIRKRPLIETNGETGEIVWDKGRDFATVRKVLSMPQVNIVKKTEVQTGGFSKESILPKRNSDKLIARKKDWDPKKYGGFDSPTVAYSVLVVAKVEKGKSKKLKSVKELLGITIMERSSFEKNPIDFLEAKGYKEVKKDLIIKLPKYSLFELENGRKRMLASAGELQKGNELALPSKYVNFLYLASHYEKLKGSPEDNEQKQLFVEQHKHYLDEIIEQISEFSKRVILADANLDKVLSAYNKHRDKPIREQAENIIHLFTLTNLGAPAAFKYFDTTIDRKRYTSTKEVLDATLIHQSITGLYETRIDLSQLGGDSGGSTNLSDIIEKETGKQLVIQESILMLPEEVEEVIGNKPESDILVHTAYDESTDENVMLLTSDAPEYKPWALVIQDSNGENKIKMLSGGSPKKKRKV

SEQ ID NO: 10 - RNA, 5511 nt, synthetic construct
  source 1..5511: mol_type = other RNA
gggtcccgcagtcggcgtccagcggctctgcttgttcgtgtgtgtgtcgttgcaggccttattcggatccaccatgagctcagagactggcccagtggctgtggaccccacattgagacggcggatcgagccccatgagtttgaggtattcttcgatccgagagagctccgcaaggagacctgcctgctttacgaaattaattgggggggccggcactccatttggcgacatacatcacagaacactaacaagcacgtcgaagtcaacttcatcgagaagttcacgacagaaagatatttctgtccgaacacaaggtgcagcattacctggtttctcagctggagcccatgcggcgaatgtagtagggccatcactgaattcctgtcaaggtatccccacgtcactctgtttatttacatcgcaaggctgtaccaccacgctgacccccgcaatcgacaaggcctgcgggatttgatctcttcaggtgtgactatccaaattatgactgagcaggagtcaggatactgctggagaaactttgtgaattatagcccgagtaatgaagcccactggcctaggtatccccatctgtgggtacgactgtacgttcttgaactgtactgcatcatactgggcctgcctccttgtctcaacattctgagaaggaagcagccacagctgacattctttaccatcgctcttcagtcttgtcattaccagcgactgcccccacacattctctgggccaccgggttgaaaagcggcagcgagactccgggcacctcagagtccgccacacccgaaagtgataagaagtactcaatcgggctggccatcggaactaattccgtgggttgggcagtgatcacggatgaatacaaagtgccgtccaagaagttcaaggtcctggggaacaccgatagacacagcatcaagaaaaatctcatcggagccctgctgtttgactccggcgaaaccgcagaagcgacccggctcaaacgtaccgcgaggcgacgctacacccggcggaagaatcgcatctgctatctgcaagagatcttttcgaacgaaatggcaaaggtcgacgacagcttcttccaccgcctggaagaatctttcctggtggaggaggacaagaagcatgaacggcatcctatctttggaaacatcgtcgacgaagtggcgtaccacgaaaagtacccgaccatctaccatctgcggaagaagttggttgactcaactgacaaggccgacctcagattgatctacttggccctcgcccatatgatcaaattccgcggacacttcctgatcgaaggcgatctgaaccctgataactccgacgtggataagcttttcattcaactggtgcagacctacaaccaactgttcgaagaaaacccaatcaatgctagcggcgtcgatgccaaggccatcctgtccgcccggctgtcgaagtcgcggcgcctcgaaaacctgatcgcacagctgccgggagagaaaaagaacggacttttcggcaacttgatcgctctctcactgggactcactcccaatttcaagtccaattttgacctggccgaggacgcgaagctgcaactctcaaaggacacctacgacgacgacttggacaatttgctggcacaaattggcgatcagtacgcggatctgttccttgccgctaagaacctttcggacgcaatcttgctgtccgatatcctgcgcgtgaacaccgaaataaccaaagcgccgcttagcgcctcgatgattaagcggtacgacgagcatcaccaggatctcacgctgctcaaagcgctcgtgagacagcaactgcctgaaaagtacaaggagatcttcttcgaccagtccaagaatgggtacgcagggtacatcgatggaggcgctagccaggaagagttctataagttcatcaagccaatcctggaaaagatggacggaaccgaagaactgctggtcaagctgaacagggaggatctgctccggaaacagagaacctttgacaacggatccattccccaccagatccatctgggtgagctgcacgccatcttgcggcgccaggaggacttttacccattcctcaaggacaaccgggaaaagatcgagaaaattctgacgttccgcatcccgtattacgtgggcccactggcgcgcggcaattcgcgcttcgcgtggatgactagaaaatcagaggaaaccatcactccttggaatttcgaggaagttgtggataagggagcttcggcacaaagcttcatcgaacgaatgaccaacttcgacaagaatctcccaaacgagaaggtgcttcctaagcacagcctcctttacgaatacttcactgtctacaacgaactgactaaagtgaaatacgttactgaaggaatgaggaagccggcctttctgtccggagaacagaagaaagcaattgtcgatctgctgttcaagaccaaccgcaaggtgaccgtcaagcagcttaaagaggactacttcaagaagatcgagtgtttcgactcagtggaaatcagcggggtggaggacagattcaacgcttcgctgggaacctatcatgatctcctgaagatcatcaaggacaaggacttccttgacaacgaggagaacgaggacatcctggaagatatcgtcctgaccttgacccttttcgaggatcgcgagatgatcgaggagaggcttaagacctacgctcatctcttcgacgataaggtcatgaaacaactcaagcgccgccggtacactggttggggccgcctctcccgcaagctgatcaacggtattcgcgataaacagagcggtaaaactatcctggatttcctcaaatcggatggcttcgctaatcgtaacttcatgcaattgatccacgacgacagcctgacctttaaggaggacatccaaaaagcacaagtgtccggacagggagactcactccatgaacacatcgcgaatctggccggttcgccggcgattaagaagggaattctgcaaactgtgaaggtggtcgacgagctggtgaaggtcatgggacggcacaaaccggagaatatcgtgattgaaatggcccgagaaaaccagactacccagaagggccagaaaaactcccgcgaaaggatgaagcggatcgaagaaggaatcaaggagctgggcagccagatcctgaaagagcacccggtggaaaacacgcagctgcagaacgagaagctctacctgtactatttgcaaaatggacgggacatgtacgtggaccaagagctggacatcaatcggttgtctgattacgacgtggaccacatcgttccacagtcctttctgaaggatgactcgatcgataacaaggtgttgactcgcagcgacaagaacagagggaagtcagataatgtgccatcggaggaggtcgtgaagaagatgaagaattactggcggcagctcctgaatgcgaagctgattacccagagaaagtttgacaatctcactaaagccgagcgcggcggactctcagagctggataaggctggattcatcaaacggcagctggtcgagactcggcagattaccaagcacgtggcgcagatcttggactcccgcatgaacactaaatacgacgagaacgataagctcatccgggaagtgaaggtgattaccctgaaaagcaaacttgtgtcggactttcggaaggactttcagttttacaaagtgagagaaatcaacaactaccatcacgcgcatgacgcatacctcaacgctgtggtcggtaccgccctgatcaaaaagtaccctaaacttgaatcggagtttgtgtacggagactacaaggtctacgacgtgaggaagatgatagccaagtccgaacaggaaatcgggaaagcaactgcgaaatacttcttttactcaaacatcatgaactttttcaagactgaaattacgctggccaatggagaaatcaggaagaggccactgatcgaaactaacggagaaacgggcgaaatcgtgtgggacaagggcagggacttcgcaactgttcgcaaagtgctctctatgccgcaagtcaatattgtgaagaaaaccgaagtgcaaaccggcggattttcaaaggaatcgatcctcccaaagagaaatagcgacaagctcattgcacgcaagaaagactgggacccgaagaagtacggaggattcgattcgccgactgtcgcatactccgtcctcgtggtggccaaggtggagaagggaaagagcaaaaagctcaaatccgtcaaagagctgctggggattaccatcatggaacgatcctcgttcgagaagaacccgattgatttcctcgaggcgaagggttacaaggaggtgaagaaggatctgatcatcaaactccccaagtactcactgttcgaactggaaaatggtcggaagcgcatgctggcttcggccggagaactccaaaaaggaaatgagctggccttgcctagcaagtacgtcaacttcctctatcttgcttcgcactacgaaaaactcaaagggtcaccggaagataacgaacagaagcagcttttcgtggagcagcacaagcattatctggatgaaatcatcgaacaaatctccgagttttcaaagcgcgtgatcctcgccgacgccaacctcgacaaagtcctgtcggcctacaataagcatagagataagccgatcagagaacaggccgagaacattatccacttgttcaccctgactaacctgggagccccagccgccttcaagtacttcgatactactatcgatcgcaaaagatacacgtccaccaaggaagttctggacgcgaccctgatccaccaaagcatcactggactctacgaaactaggatcgatctgtcgcagctgggtggcgattctggtggttctactaatctgtcagatattattgaaaaggagaccggtaagcaactggttatccaggaatccatcctcatgctcccagaggaggtggaagaagtcattgggaacaagccggaaagcgatatactcgtgcacaccgcctacgacgagagcaccgacgagaatgtcatgcttctgactagcgacgcccctgaatacaagccttgggctctggtcatacaggatagcaacggtgagaacaagattaagatgctctctggtggttctcccaagaagaagaggaaagtctaatagtctagccatcacatttaaaagcatctcagcctaccatgagaataagagaaagaaaatgaagatcaatagcttattcatctctttttctttttcgttggtgtaaagccaacaccctgtctaaaaaacataaatttctttaatcattttgcctcttttctctgtgcttcaattaataaaaaatggaaagaacctcgagaaaaaaaaaaaaaaaaaaaaaaaaaaaaaagcgaaaaaaaaaaaaaaaaaaaaaaaaaaaaaaccgaaaaaaaaaaaaaaaaaaaaaaaaaaaaaaaaaaaaaaat

SEQ ID NO: 11 - RNA, 5133 nt, synthetic construct
  source 1..5133: mol_type = other RNA
atgagctcagagactggcccagtggctgtggaccccacattgagacggcggatcgagccccatgagtttgaggtattcttcgatccgagagagctccgcaaggagacctgcctgctttacgaaattaattgggggggccggcactccatttggcgacatacatcacagaacactaacaagcacgtcgaagtcaacttcatcgagaagttcacgacagaaagatatttctgtccgaacacaaggtgcagcattacctggtttctcagctggagcccatgcggcgaatgtagtagggccatcactgaattcctgtcaaggtatccccacgtcactctgtttatttacatcgcaaggctgtaccaccacgctgacccccgcaatcgacaaggcctgcgggatttgatctcttcaggtgtgactatccaaattatgactgagcaggagtcaggatactgctggagaaactttgtgaattatagcccgagtaatgaagcccactggcctaggtatccccatctgtgggtacgactgtacgttcttgaactgtactgcatcatactgggcctgcctccttgtctcaacattctgagaaggaagcagccacagctgacattctttaccatcgctcttcagtcttgtcattaccagcgactgcccccacacattctctgggccaccgggttgaaaagcggcagcgagactccgggcacctcagagtccgccacacccgaaagtgataagaagtactcaatcgggctggccatcggaactaattccgtgggttgggcagtgatcacggatgaatacaaagtgccgtccaagaagttcaaggtcctggggaacaccgatagacacagcatcaagaaaaatctcatcggagccctgctgtttgactccggcgaaaccgcagaagcgacccggctcaaacgtaccgcgaggcgacgctacacccggcggaagaatcgcatctgctatctgcaagagatcttttcgaacgaaatggcaaaggtcgacgacagcttcttccaccgcctggaagaatctttcctggtggaggaggacaagaagcatgaacggcatcctatctttggaaacatcgtcgacgaagtggcgtaccacgaaaagtacccgaccatctaccatctgcggaagaagttggttgactcaactgacaaggccgacctcagattgatctacttggccctcgcccatatgatcaaattccgcggacacttcctgatcgaaggcgatctgaaccctgataactccgacgtggataagcttttcattcaactggtgcagacctacaaccaactgttcgaagaaaacccaatcaatgctagcggcgtcgatgccaaggccatcctgtccgcccggctgtcgaagtcgcggcgcctcgaaaacctgatcgcacagctgccgggagagaaaaagaacggacttttcggcaacttgatcgctctctcactgggactcactcccaatttcaagtccaattttgacctggccgaggacgcgaagctgcaactctcaaaggacacctacgacgacgacttggacaatttgctggcacaaattggcgatcagtacgcggatctgttccttgccgctaagaacctttcggacgcaatcttgctgtccgatatcctgcgcgtgaacaccgaaataaccaaagcgccgcttagcgcctcgatgattaagcggtacgacgagcatcaccaggatctcacgctgctcaaagcgctcgtgagacagcaactgcctgaaaagtacaaggagatcttcttcgaccagtccaagaatgggtacgcagggtacatcgatggaggcgctagccaggaagagttctataagttcatcaagccaatcctggaaaagatggacggaaccgaagaactgctggtcaagctgaacagggaggatctgctccggaaacagagaacctttgacaacggatccattccccaccagatccatctgggtgagctgcacgccatcttgcggcgccaggaggacttttacccattcctcaaggacaaccgggaaaagatcgagaaaattctgacgttccgcatcccgtattacgtgggcccactggcgcgcggcaattcgcgcttcgcgtggatgactagaaaatcagaggaaaccatcactccttggaatttcgaggaagttgtggataagggagcttcggcacaaagcttcatcgaacgaatgaccaacttcgacaagaatctcccaaacgagaaggtgcttcctaagcacagcctcctttacgaatacttcactgtctacaacgaactgactaaagtgaaatacgttactgaaggaatgaggaagccggcctttctgtccggagaacagaagaaagcaattgtcgatctgctgttcaagaccaaccgcaaggtgaccgtcaagcagcttaaagaggactacttcaagaagatcgagtgtttcgactcagtggaaatcagcggggtggaggacagattcaacgcttcgctgggaacctatcatgatctcctgaagatcatcaaggacaaggacttccttgacaacgaggagaacgaggacatcctggaagatatcgtcctgaccttgacccttttcgaggatcgcgagatgatcgaggagaggcttaagacctacgctcatctcttcgacgataaggtcatgaaacaactcaagcgccgccggtacactggttggggccgcctctcccgcaagctgatcaacggtattcgcgataaacagagcggtaaaactatcctggatttcctcaaatcggatggcttcgctaatcgtaacttcatgcaattgatccacgacgacagcctgacctttaaggaggacatccaaaaagcacaagtgtccggacagggagactcactccatgaacacatcgcgaatctggccggttcgccggcgattaagaagggaattctgcaaactgtgaaggtggtcgacgagctggtgaaggtcatgggacggcacaaaccggagaatatcgtgattgaaatggcccgagaaaaccagactacccagaagggccagaaaaactcccgcgaaaggatgaagcggatcgaagaaggaatcaaggagctgggcagccagatcctgaaagagcacccggtggaaaacacgcagctgcagaacgagaagctctacctgtactatttgcaaaatggacgggacatgtacgtggaccaagagctggacatcaatcggttgtctgattacgacgtggaccacatcgttccacagtcctttctgaaggatgactcgatcgataacaaggtgttgactcgcagcgacaagaacagagggaagtcagataatgtgccatcggaggaggtcgtgaagaagatgaagaattactggcggcagctcctgaatgcgaagctgattacccagagaaagtttgacaatctcactaaagccgagcgcggcggactctcagagctggataaggctggattcatcaaacggcagctggtcgagactcggcagattaccaagcacgtggcgcagatcttggactcccgcatgaacactaaatacgacgagaacgataagctcatccgggaagtgaaggtgattaccctgaaaagcaaacttgtgtcggactttcggaaggactttcagttttacaaagtgagagaaatcaacaactaccatcacgcgcatgacgcatacctcaacgctgtggtcggtaccgccctgatcaaaaagtaccctaaacttgaatcggagtttgtgtacggagactacaaggtctacgacgtgaggaagatgatagccaagtccgaacaggaaatcgggaaagcaactgcgaaatacttcttttactcaaacatcatgaactttttcaagactgaaattacgctggccaatggagaaatcaggaagaggccactgatcgaaactaacggagaaacgggcgaaatcgtgtgggacaagggcagggacttcgcaactgttcgcaaagtgctctctatgccgcaagtcaatattgtgaagaaaaccgaagtgcaaaccggcggattttcaaaggaatcgatcctcccaaagagaaatagcgacaagctcattgcacgcaagaaagactgggacccgaagaagtacggaggattcgattcgccgactgtcgcatactccgtcctcgtggtggccaaggtggagaagggaaagagcaaaaagctcaaatccgtcaaagagctgctggggattaccatcatggaacgatcctcgttcgagaagaacccgattgatttcctcgaggcgaagggttacaaggaggtgaagaaggatctgatcatcaaactccccaagtactcactgttcgaactggaaaatggtcggaagcgcatgctggcttcggccggagaactccaaaaaggaaatgagctggccttgcctagcaagtacgtcaacttcctctatcttgcttcgcactacgaaaaactcaaagggtcaccggaagataacgaacagaagcagcttttcgtggagcagcacaagcattatctggatgaaatcatcgaacaaatctccgagttttcaaagcgcgtgatcctcgccgacgccaacctcgacaaagtcctgtcggcctacaataagcatagagataagccgatcagagaacaggccgagaacattatccacttgttcaccctgactaacctgggagccccagccgccttcaagtacttcgatactactatcgatcgcaaaagatacacgtccaccaaggaagttctggacgcgaccctgatccaccaaagcatcactggactctacgaaactaggatcgatctgtcgcagctgggtggcgattctggtggttctactaatctgtcagatattattgaaaaggagaccggtaagcaactggttatccaggaatccatcctcatgctcccagaggaggtggaagaagtcattgggaacaagccggaaagcgatatactcgtgcacaccgcctacgacgagagcaccgacgagaatgtcatgcttctgactagcgacgcccctgaatacaagccttgggctctggtcatacaggatagcaacggtgagaacaagattaagatgctctctggtggttctcccaagaagaagaggaaagtctaa

SEQ ID NO: 12 - protein, 1710 aa, synthetic construct; identical to SEQ ID NO: 9

SEQ ID NO: 13 - RNA, 589 nt, synthetic construct
  source 1..589: mol_type = other RNA
gggagacccaagctggctagctcccgcagtcggcgtccagcggctctgcttgttcgtgtgtgtgtcgttgcaggccttattcggatccgccaccatgggaccgaagaagaagagaaaggtcggaggaggaagcacaaacctgtcggacatcatcgaaaaggaaacaggaaagcagctggtcatccaggaatcgatcctgatgctgccggaagaagtcgaagaagtcatcggaaacaagccggaatcggacatcctggtccacacagcatacgacgaatcgacagacgaaaacgtcatgctgctgacatcggacgcaccggaatacaagccgtgggcactggtcatccaggactcgaacggagaaaacaagatcaagatgctgtgatagtctagacatcacatttaaaagcatctcagcctaccatgagaataagagaaagaaaatgaagatcaatagcttattcatctctttttctttttcgttggtgtaaagccaacaccctgtctaaaaaacataaatttctttaatcattttgcctcttttctctgtgcttcaattaataaaaaatggaaagaacctcgagtctag

SEQ ID NO: 14 - RNA, 291 nt, synthetic construct
  source 1..291: mol_type = other RNA
atgggaccgaagaagaagagaaaggtcggaggaggaagcacaaacctgtcggacatcatcgaaaaggaaacaggaaagcagctggtcatccaggaatcgatcctgatgctgccggaagaagtcgaagaagtcatcggaaacaagccggaatcggacatcctggtccacacagcatacgacgaatcgacagacgaaaacgtcatgctgctgacatcggacgcaccggaatacaagccgtgggcactggtcatccaggactcgaacggagaaaacaagatcaagatgctgtga

SEQ ID NO: 15 - protein, 107 aa, synthetic construct
MTNLSDIIEKETGKQLVIQESILMLPEEVEEVIGNKPESDILVHTAYDESTDENVMLLTSDAPEYKPWALVIQDSNGENKIKMLSGGSKRTADGSEFESPKKKRKVE

SEQ ID NO: 16 - RNA, 5933 nt, synthetic construct
  source 1..5933: mol_type = other RNA
gggaagctcagaataaacgctcaactttggccggatctgccaccatggaggcctcccccgcctccggcccccggcacctgatggacccccacatcttcacctccaacttcaacaacggcatcggccggcacaagacctacctgtgctacgaggtggagcggctggacaacggcacctccgtgaagatggaccagcaccggggcttcctgcacaaccaggccaagaacctgctgtgcggcttctacggccggcacgccgagctgcggttcctggacctggtgccctccctgcagctggaccccgcccagatctaccgggtgacctggttcatctcctggtccccctgcttctcctggggctgcgccggcgaggtgcgggccttcctgcaggagaacacccacgtgcggctgcggatcttcgccgcccggatctacgactacgaccccctgtacaaggaggccctgcagatgctgcgggacgccggcgcccaggtgtccatcatgacctacgacgagttcaagcactgctgggacaccttcgtggaccaccagggctgccccttccagccctgggacggcctggacgagcactcccaggccctgtccggccggctgcgggccatcctgcagaaccagggcaactccggctccgagacccccggcacctccgagtccgccacccccgagtccgacaagaagtactccatcggcctggccatcggcaccaactccgtgggctgggccgtgatcaccgacgagtacaaggtgccctccaagaagttcaaggtgctgggcaacaccgaccggcactccatcaagaagaacctgatcggcgccctgctgttcgactccggcgagaccgccgaggccacccggctgaagcggaccgcccggcggcggtacacccggcggaagaaccggatctgctacctgcaggagatcttctccaacgagatggccaaggtggacgactccttcttccaccggctggaggagtccttcctggtggaggaggacaagaagcacgagcggcaccccatcttcggcaacatcgtggacgaggtggcctaccacgagaagtaccccaccatctaccacctgcggaagaagctggtggactccaccgacaaggccgacctgcggctgatctacctggccctggcccacatgatcaagttccggggccacttcctgatcgagggcgacctgaaccccgacaactccgacgtggacaagctgttcatccagctggtgcagacctacaaccagctgttcgaggagaaccccatcaacgcctccggcgtggacgccaaggccatcctgtccgcccggctgtccaagtcccggcggctggagaacctgatcgcccagctgcccggcgagaagaagaacggcctgttcggcaacctgatcgccctgtccctgggcctgacccccaacttcaagtccaacttcgacctggccgaggacgccaagctgcagctgtccaaggacacctacgacgacgacctggacaacctgctggcccagatcggcgaccagtacgccgacctgttcctggccgccaagaacctgtccgacgccatcctgctgtccgacatcctgcgggtgaacaccgagatcaccaaggcccccctgtccgcctccatgatcaagcggtacgacgagcaccaccaggacctgaccctgctgaaggccctggtgcggcagcagctgcccgagaagtacaaggagatcttcttcgaccagtccaagaacggctacgccggctacatcgacggcggcgcctcccaggaggagttctacaagttcatcaagcccatcctggagaagatggacggcaccgaggagctgctggtgaagctgaaccgggaggacctgctgcggaagcagcggaccttcgacaacggctccatcccccaccagatccacctgggcgagctgcacgccatcctgcggcggcaggaggacttctaccccttcctgaaggacaaccgggagaagatcgagaagatcctgaccttccggatcccctactacgtgggccccctggcccggggcaactcccggttcgcctggatgacccggaagtccgaggagaccatcaccccctggaacttcgaggaggtggtggacaagggcgcctccgcccagtccttcatcgagcggatgaccaacttcgacaagaacctgcccaacgagaaggtgctgcccaagcactccctgctgtacgagtacttcaccgtgtacaacgagctgaccaaggtgaagtacgtgaccgagggcatgcggaagcccgccttcctgtccggcgagcagaagaaggccatcgtggacctgctgttcaagaccaaccggaaggtgaccgtgaagcagctgaaggaggactacttcaagaagatcgagtgcttcgactccgtggagatctccggcgtggaggaccggttcaacgcctccctgggcacctaccacgacctgctgaagatcatcaaggacaaggacttcctggacaacgaggagaacgaggacatcctggaggacatcgtgctgaccctgaccctgttcgaggaccgggagatgatcgaggagcggctgaagacctacgcccacctgttcgacgacaaggtgatgaagcagctgaagcggcggcggtacaccggctggggccggctgtcccggaagctgatcaacggcatccgggacaagcagtccggcaagaccatcctggacttcctgaagtccgacggcttcgccaaccggaacttcatgcagctgatccacgacgactccctgaccttcaaggaggacatccagaaggcccaggtgtccggccagggcgactccctgcacgagcacatcgccaacctggccggctcccccgccatcaagaagggcatcctgcagaccgtgaaggtggtggacgagctggtgaaggtgatgggccggcacaagcccgagaacatcgtgatcgagatggcccgggagaaccagaccacccagaagggccagaagaactcccgggagcggatgaagcggatcgaggagggcatcaaggagctgggctcccagatcctgaaggagcaccccgtggagaacacccagctgcagaacgagaagctgtacctgtactacctgcagaacggccgggacatgtacgtggaccaggagctggacatcaaccggctgtccgactacgacgtggaccacatcgtgccccagtccttcctgaaggacgactccatcgacaacaaggtgctgacccggtccgacaagaaccggggcaagtccgacaacgtgccctccgaggaggtggtgaagaagatgaagaactactggcggcagctgctgaacgccaagctgatcacccagcggaagttcgacaacctgaccaaggccgagcggggcggcctgtccgagctggacaaggccggcttcatcaagcggcagctggtggagacccggcagatcaccaagcacgtggcccagatcctggactcccggatgaacaccaagtacgacgagaacgacaagctgatccgggaggtgaaggtgatcaccctgaagtccaagctggtgtccgacttccggaaggacttccagttctacaaggtgcgggagatcaacaactaccaccacgcccacgacgcctacctgaacgccgtggtgggcaccgccctgatcaagaagtaccccaagctggagtccgagttcgtgtacggcgactacaaggtgtacgacgtgcggaagatgatcgccaagtccgagcaggagatcggcaaggccaccgccaagtacttcttctactccaacatcatgaacttcttcaagaccgagatcaccctggccaacggcgagatccggaagcggcccctgatcgagaccaacggcgagaccggcgagatcgtgtgggacaagggccgggacttcgccaccgtgcggaaggtgctgtccatgccccaggtgaacatcgtgaagaagaccgaggtgcagaccggcggcttctccaaggagtccatcctgcccaagcggaactccgacaagctgatcgcccggaagaaggactgggaccccaagaagtacggcggcttcgactcccccaccgtggcctactccgtgctggtggtggccaaggtggagaagggcaagtccaagaagctgaagtccgtgaaggagctgctgggcatcaccatcatggagcggtcctccttcgagaagaaccccatcgacttcctggaggccaagggctacaaggaggtgaagaaggacctgatcatcaagctgcccaagtactccctgttcgagctggagaacggccggaagcggatgctggcctccgccggcgagctgcagaagggcaacgagctggccctgccctccaagtacgtgaacttcctgtacctggcctcccactacgagaagctgaagggctcccccgaggacaacgagcagaagcagctgttcgtggagcagcacaagcactacctggacgagatcatcgagcagatctccgagttctccaagcgggtgatcctggccgacgccaacctggacaaggtgctgtccgcctacaacaagcaccgggacaagcccatccgggagcaggccgagaacatcatccacctgttcaccctgaccaacctgggcgcccccgccgccttcaagtacttcgacaccaccatcgaccggaagcggtacacctccaccaaggaggtgctggacgccaccctgatccaccagtccatcaccggcctgtacgagacccggatcgacctgtcccagctgggcggcgactccggcggctccggcggctccggcggctccaccaacctgtccgacatcatcgagaaggagaccggcaagcagctggtgatccaggagtccatcctgatgctgcccgaggaggtggaggaggtgatcggcaacaagcccgagtccgacatcctggtgcacaccgcctacgacgagtccaccgacgagaacgtgatgctgctgacctccgacgcccccgagtacaagccctgggccctggtgatccaggactccaacggcgagaacaagatcaagatgctgtccggcggctccggcggctccggcggctccaccaacctgtccgacatcatcgagaaggagaccggcaagcagctggtgatccaggagtccatcctgatgctgcccgaggaggtggaggaggtgatcggcaacaagcccgagtccgacatcctggtgcacaccgcctacgacgagtccaccgacgagaacgtgatgctgctgacctccgacgcccccgagtacaagccctgggccctggtgatccaggactccaacggcgagaacaagatcaagatgctgtccggcggctccaagcggaccgccgacggctccgagttcgagcccaagaagaagcggaaggtgtgatagctagcaccagcctcaagaacacccgaatggagtctctaagctacataataccaacttacactttacaaaatgttgtcccccaaaatgtagccattcgtatctgctcctaataaaaagaaagtttcttcacattctctcgagaaaaaaaaaaaatggaaaaaaaaaaaacggaaaaaaaaaaaaggtaaaaaaaaaaaatataaaaaaaaaaaacataaaaaaaaaaaacgaaaaaaaaaaaacgtaaaaaaaaaaaactcaaaaaaaaaaaagataaaaaaaaaaaacctaaaaaaaaaaaatgtaaaaaaaaaaaagggaaaaaaaaaaaacgcaaaaaaaaaaaacacaaaaaaaaaaaatgcaaaaaaaaaaaatcgaaaaaaaaaaaatctaaaaaaaaaaaacgaaaaaaaaaaaacccaaaaaaaaaaaagacaaaaaaaaaaaatagaaaaaaaaaaaagttaaaaaaaaaaaactgaaaaaaaaaaaatttaaaaaaaaaaaatctag

SEQ ID NO: 17 - RNA, 5373 nt, synthetic construct
  source 1..5373: mol_type = other RNA
atggaggcctcccccgcctccggcccccggcacctgatggacccccacatcttcacctccaacttcaacaacggcatcggccggcacaagacctacctgtgctacgaggtggagcggctggacaacggcacctccgtgaagatggaccagcaccggggcttcctgcacaaccaggccaagaacctgctgtgcggcttctacggccggcacgccgagctgcggttcctggacctggtgccctccctgcagctggaccccgcccagatctaccgggtgacctggttcatctcctggtccccctgcttctcctggggctgcgccggcgaggtgcgggccttcctgcaggagaacacccacgtgcggctgcggatcttcgccgcccggatctacgactacgaccccctgtacaaggaggccctgcagatgctgcgggacgccggcgcccaggtgtccatcatgacctacgacgagttcaagcactgctgggacaccttcgtggaccaccagggctgccccttccagccctgggacggcctggacgagcactcccaggccctgtccggccggctgcgggccatcctgcagaaccagggcaactccggctccgagacccccggcacctccgagtccgccacccccgagtccgacaagaagtactccatcggcctggccatcggcaccaactccgtgggctgggccgtgatcaccgacgagtacaaggtgccctccaagaagttcaaggtgctgggcaacaccgaccggcactccatcaagaagaacctgatcggcgccctgctgttcgactccggcgagaccgccgaggccacccggctgaagcggaccgcccggcggcggtacacccggcggaagaaccggatctgctacctgcaggagatcttctccaacgagatggccaaggtggacgactccttcttccaccggctggaggagtccttcctggtggaggaggacaagaagcacgagcggcaccccatcttcggcaacatcgtggacgaggtggcctaccacgagaagtaccccaccatctaccacctgcggaagaagctggtggactccaccgacaaggccgacctgcggctgatctacctggccctggcccacatgatcaagttccggggccacttcctgatcgagggcgacctgaaccccgacaactccgacgtggacaagctgttcatccagctggtgcagacctacaaccagctgttcgaggagaaccccatcaacgcctccggcgtggacgccaaggccatcctgtccgcccggctgtccaagtcccggcggctggagaacctgatcgcccagctgcccggcgagaagaagaacggcctgttcggcaacctgatcgccctgtccctgggcctgacccccaacttcaagtccaacttcgacctggccgaggacgccaagctgcagctgtccaaggacacctacgacgacgacctggacaacctgctggcccagatcggcgaccagtacgccgacctgttcctggccgccaagaacctgtccgacgccatcctgctgtccgacatcctgcgggtgaacaccgagatcaccaaggcccccctgtccgcctccatgatcaagcggtacgacgagcaccaccaggacctgaccctgctgaaggccctggtgcggcagcagctgcccgagaagtacaaggagatcttcttcgaccagtccaagaacggctacgccggctacatcgacggcggcgcctcccaggaggagttctacaagttcatcaagcccatcctggagaagatggacggcaccgaggagctgctggtgaagctgaaccgggaggacctgctgcggaagcagcggaccttcgacaacggctccatcccccaccagatccacctgggcgagctgcacgccatcctgcggcggcaggaggacttctaccccttcctgaaggacaaccgggagaagatcgagaagatcctgaccttccggatcccctactacgtgggccccctggcccggggcaactcccggttcgcctggatgacccggaagtccgaggagaccatcaccccctggaacttcgaggaggtggtggacaagggcgcctccgcccagtccttcatcgagcggatgaccaacttcgacaagaacctgcccaacgagaaggtgctgcccaagcactccctgctgtacgagtacttcaccgtgtacaacgagctgaccaaggtgaagtacgtgaccgagggcatgcggaagcccgccttcctgtccggcgagcagaagaaggccatcgtggacctgctgttcaagaccaaccggaaggtgaccgtgaagcagctgaaggaggactacttcaagaagatcgagtgcttcgactccgtggagatctccggcgtggaggaccggttcaacgcctccctgggcacctaccacgacctgctgaagatcatcaaggacaaggacttcctggacaacgaggagaacgaggacatcctggaggacatcgtgctgaccctgaccctgttcgaggaccgggagatgatcgaggagcggctgaagacctacgcccacctgttcgacgacaaggtgatgaagcagctgaagcggcggcggtacaccggctggggccggctgtcccggaagctgatcaacggcatccgggacaagcagtccggcaagaccatcctggacttcctgaagtccgacggcttcgccaaccggaacttcatgcagctgatccacgacgactccctgaccttcaaggaggacatccagaaggcccaggtgtccggccagggcgactccctgcacgagcacatcgccaacctggccggctcccccgccatcaagaagggcatcctgcagaccgtgaaggtggtggacgagctggtgaaggtgatgggccggcacaagcccgagaacatcgtgatcgagatggcccgggagaaccagaccacccagaagggccagaagaactcccgggagcggatgaagcggatcgaggagggcatcaaggagctgggctcccagatcctgaaggagcaccccgtggagaacacccagctgcagaacgagaagctgtacctgtactacctgcagaacggccgggacatgtacgtggaccaggagctggacatcaaccggctgtccgactacgacgtggaccacatcgtgccccagtccttcctgaaggacgactccatcgacaacaaggtgctgacccggtccgacaagaaccggggcaagtccgacaacgtgccctccgaggaggtggtgaagaagatgaagaactactggcggcagctgctgaacgccaagctgatcacccagcggaagttcgacaacctgaccaaggccgagcggggcggcctgtccgagctggacaaggccggcttcatcaagcggcagctggtggagacccggcagatcaccaagcacgtggcccagatcctggactcccggatgaacaccaagtacgacgagaacgacaagctgatccgggaggtgaaggtgatcaccctgaagtccaagctggtgtccgacttccggaaggacttccagttctacaaggtgcgggagatcaacaactaccaccacgcccacgacgcctacctgaacgccgtggtgggcaccgccctgatcaagaagtaccccaagctggagtccgagttcgtgtacggcgactacaaggtgtacgacgtgcggaagatgatcgccaagtccgagcaggagatcggcaaggccaccgccaagtacttcttctactccaacatcatgaacttcttcaagaccgagatcaccctggccaacggcgagatccggaagcggcccctgatcgagaccaacggcgagaccggcgagatcgtgtgggacaagggccgggacttcgccaccgtgcggaaggtgctgtccatgccccaggtgaacatcgtgaagaagaccgaggtgcagaccggcggcttctccaaggagtccatcctgcccaagcggaactccgacaagctgatcgcccggaagaaggactgggaccccaagaagtacggcggcttcgactcccccaccgtggcctactccgtgctggtggtggccaaggtggagaagggcaagtccaagaagctgaagtccgtgaaggagctgctgggcatcaccatcatggagcggtcctccttcgagaagaaccccatcgacttcctggaggccaagggctacaaggaggtgaagaaggacctgatcatcaagctgcccaagtactccctgttcgagctggagaacggccggaagcggatgctggcctccgccggcgagctgcagaagggcaacgagctggccctgccctccaagtacgtgaacttcctgtacctggcctcccactacgagaagctgaagggctcccccgaggacaacgagcagaagcagctgttcgtggagcagcacaagcactacctggacgagatcatcgagcagatctccgagttctccaagcgggtgatcctggccgacgccaacctggacaaggtgctgtccgcctacaacaagcaccgggacaagcccatccgggagcaggccgagaacatcatccacctgttcaccctgaccaacctgggcgcccccgccgccttcaagtacttcgacaccaccatcgaccggaagcggtacacctccaccaaggaggtgctggacgccaccctgatccaccagtccatcaccggcctgtacgagacccggatcgacctgtcccagctgggcggcgactccggcggctccggcggctccggcggctccaccaacctgtccgacatcatcgagaaggagaccggcaagcagctggtgatccaggagtccatcctgatgctgcccgaggaggtggaggaggtgatcggcaacaagcccgagtccgacatcctggtgcacaccgcctacgacgagtccaccgacgagaacgtgatgctgctgacctccgacgcccccgagtacaagccctgggccctggtgatccaggactccaacggcgagaacaagatcaagatgctgtccggcggctccggcggctccggcggctccaccaacctgtccgacatcatcgagaaggagaccggcaagcagctggtgatccaggagtccatcctgatgctgcccgaggaggtggaggaggtgatcggcaacaagcccgagtccgacatcctggtgcacaccgcctacgacgagtccaccgacgagaacgtgatgctgctgacctccgacgcccccgagtacaagccctgggccctggtgatccaggactccaacggcgagaacaagatcaagatgctgtccggcggctccaagcggaccgccgacggctccgagttcgagcccaagaagaagcggaaggtgtgatag

SEQ ID NO: 18 - protein, 1789 aa, synthetic construct
MEASPASGPRHLMDPHIFTSNFNNGIGRHKTYLCYEVERLDNGTSVKMDQHRGFLHNQAKNLLCGFYGRHAELRFLDLVPSLQLDPAQIYRVTWFISWSPCFSWGCAGEVRAFLQENTHVRLRIFAARIYDYDPLYKEALQMLRDAGAQVSIMTYDEFKHCWDTFVDHQGCPFQPWDGLDEHSQALSGRLRAILQNQGNSGSETPGTSESATPESDKKYSIGLAIGTNSVGWAVITDEYKVPSKKFKVLGNTDRHSIKKNLIGALLFDSGETAEATRLKRTARRRYTRRKNRICYLQEIFSNEMAKVDDSFFHRLEESFLVEEDKKHERHPIFGNIVDEVAYHEKYPTIYHLRKKLVDSTDKADLRLIYLALAHMIKFRGHFLIEGDLNPDNSDVDKLFIQLVQTYNQLFEENPINASGVDAKAILSARLSKSRRLENLIAQLPGEKKNGLFGNLIALSLGLTPNFKSNFDLAEDAKLQLSKDTYDDDLDNLLAQIGDQYADLFLAAKNLSDAILLSDILRVNTEITKAPLSASMIKRYDEHHQDLTLLKALVRQQLPEKYKEIFFDQSKNGYAGYIDGGASQEEFYKFIKPILEKMDGTEELLVKLNREDLLRKQRTFDNGSIPHQIHLGELHAILRRQEDFYPFLKDNREKIEKILTFRIPYYVGPLARGNSRFAWMTRKSEETITPWNFEEVVDKGASAQSFIERMTNFDKNLPNEKVLPKHSLLYEYFTVYNELTKVKYVTEGMRKPAFLSGEQKKAIVDLLFKTNRKVTVKQLKEDYFKKIECFDSVEISGVEDRFNASLGTYHDLLKIIKDKDFLDNEENEDILEDIVLTLTLFEDREMIEERLKTYAHLFDDKVMKQLKRRRYTGWGRLSRKLINGIRDKQSGKTILDFLKSDGFANRNFMQLIHDDSLTFKEDIQKAQVSGQGDSLHEHIANLAGSPAIKKGILQTVKVVDELVKVMGRHKPENIVIEMARENQTTQKGQKNSRERMKRIEEGIKELGSQILKEHPVENTQLQNEKLYLYYLQNGRDMYVDQELDINRLSDYDVDHIVPQSFLKDDSIDNKVLTRSDKNRGKSDNVPSEEVVKKMKNYWRQLLNAKLITQRKFDNLTKAERGGLSELDKAGFIKRQLVETRQITKHVAQILDSRMNTKYDENDKLIREVKVITLKSKLVSDFRKDFQFYKVREINNYHHAHDAYLNAVVGTALIKKYPKLESEFVYGDYKVYDVRKMIAKSEQEIGKATAKYFFYSNIMNFFKTEITLANGEIRKRPLIETNGETGEIVWDKGRDFATVRKVLSMPQVNIVKKTEVQTGGFSKESILPKRNSDKLIARKKDWDPKKYGGFDSPTVAYSVLVVAKVEKGKSKKLKSVKELLGITIMERSSFEKNPIDFLEAKGYKEVKKDLIIKLPKYSLFELENGRKRMLASAGELQKGNELALPSKYVNFLYLASHYEKLKGSPEDNEQKQLFVEQHKHYLDEIIEQISEFSKRVILADANLDKVLSAYNKHRDKPIREQAENIIHLFTLTNLGAPAAFKYFDTTIDRKRYTSTKEVLDATLIHQSITGLYETRIDLSQLGGDSGGSGGSGGSTNLSDIIEKETGKQLVIQESILMLPEEVEEVIGNKPESDILVHTAYDESTDENVMLLTSDAPEYKPWALVIQDSNGENKIKMLSGGSGGSGGSTNLSDIIEKETGKQLVIQESILMLPEEVEEVIGNKPESDILVHTAYDESTDENVMLLTSDAPEYKPWALVIQDSNGENKIKMLSGGSKRTADGSEFEPKKKRKV

SEQ ID NO: 19 - RNA, 6125 nt, synthetic construct
  source 1..6125: mol_type = other RNA
gggaagctcagaataaacgctcaactttggccggatctgccaccatgaagcggaccgccgacggctccgagttcgagtcccccaagaagaagcggaaggtgtcctccgagaccggccccgtggccgtggaccccaccctgcggcggcggatcgagccccacgagttcgaggtgttcttcgacccccgggagctgcggaaggagacctgcctgctgtacgagatcaactggggcggccggcactccatctggcggcacacctcccagaacaccaacaagcacgtggaggtgaacttcatcgagaagttcaccaccgagcggtacttctgccccaacacccggtgctccatcacctggttcctgtcctggtccccctgcggcgagtgctcccgggccatcaccgagttcctgtcccggtacccccacgtgaccctgttcatctacatcgcccggctgtaccaccacgccgacccccggaaccggcagggcctgcgggacctgatctcctccggcgtgaccatccagatcatgaccgagcaggagtccggctactgctggcggaacttcgtgaactactccccctccaacgaggcccactggccccggtacccccacctgtgggtgcggctgtacgtgctggagctgtactgcatcatcctgggcctgcccccctgcctgaacatcctgcggcggaagcagccccagctgaccttcttcaccatcgccctgcagtcctgccactaccagcggctgcccccccacatcctgtgggccaccggcctgaagtccggcggctcctccggcggctcctccggctccgagacccccggcacctccgagtccgccacccccgagtcctccggcggctcctccggcggctccgacaagaagtactccatcggcctggccatcggcaccaactccgtgggctgggccgtgatcaccgacgagtacaaggtgccctccaagaagttcaaggtgctgggcaacaccgaccggcactccatcaagaagaacctgatcggcgccctgctgttcgactccggcgagaccgccgaggccacccggctgaagcggaccgcccggcggcggtacacccggcggaagaaccggatctgctacctgcaggagatcttctccaacgagatggccaaggtggacgactccttcttccaccggctggaggagtccttcctggtggaggaggacaagaagcacgagcggcaccccatcttcggcaacatcgtggacgaggtggcctaccacgagaagtaccccaccatctaccacctgcggaagaagctggtggactccaccgacaaggccgacctgcggctgatctacctggccctggcccacatgatcaagttccggggccacttcctgatcgagggcgacctgaaccccgacaactccgacgtggacaagctgttcatccagctggtgcagacctacaaccagctgttcgaggagaaccccatcaacgcctccggcgtggacgccaaggccatcctgtccgcccggctgtccaagtcccggcggctggagaacctgatcgcccagctgcccggcgagaagaagaacggcctgttcggcaacctgatcgccctgtccctgggcctgacccccaacttcaagtccaacttcgacctggccgaggacgccaagctgcagctgtccaaggacacctacgacgacgacctggacaacctgctggcccagatcggcgaccagtacgccgacctgttcctggccgccaagaacctgtccgacgccatcctgctgtccgacatcctgcgggtgaacaccgagatcaccaaggcccccctgtccgcctccatgatcaagcggtacgacgagcaccaccaggacctgaccctgctgaaggccctggtgcggcagcagctgcccgagaagtacaaggagatcttcttcgaccagtccaagaacggctacgccggctacatcgacggcggcgcctcccaggaggagttctacaagttcatcaagcccatcctggagaagatggacggcaccgaggagctgctggtgaagctgaaccgggaggacctgctgcggaagcagcggaccttcgacaacggctccatcccccaccagatccacctgggcgagctgcacgccatcctgcggcggcaggaggacttctaccccttcctgaaggacaaccgggagaagatcgagaagatcctgaccttccggatcccctactacgtgggccccctggcccggggcaactcccggttcgcctggatgacccggaagtccgaggagaccatcaccccctggaacttcgaggaggtggtggacaagggcgcctccgcccagtccttcatcgagcggatgaccaacttcgacaagaacctgcccaacgagaaggtgctgcccaagcactccctgctgtacgagtacttcaccgtgtacaacgagctgaccaaggtgaagtacgtgaccgagggcatgcggaagcccgccttcctgtccggcgagcagaagaaggccatcgtggacctgctgttcaagaccaaccggaaggtgaccgtgaagcagctgaaggaggactacttcaagaagatcgagtgcttcgactccgtggagatctccggcgtggaggaccggttcaacgcctccctgggcacctaccacgacctgctgaagatcatcaaggacaaggacttcctggacaacgaggagaacgaggacatcctggaggacatcgtgctgaccctgaccctgttcgaggaccgggagatgatcgaggagcggctgaagacctacgcccacctgttcgacgacaaggtgatgaagcagctgaagcggcggcggtacaccggctggggccggctgtcccggaagctgatcaacggcatccgggacaagcagtccggcaagaccatcctggacttcctgaagtccgacggcttcgccaaccggaacttcatgcagctgatccacgacgactccctgaccttcaaggaggacatccagaaggcccaggtgtccggccagggcgactccctgcacgagcacatcgccaacctggccggctcccccgccatcaagaagggcatcctgcagaccgtgaaggtggtggacgagctggtgaaggtgatgggccggcacaagcccgagaacatcgtgatcgagatggcccgggagaaccagaccacccagaagggccagaagaactcccgggagcggatgaagcggatcgaggagggcatcaaggagctgggctcccagatcctgaaggagcaccccgtggagaacacccagctgcagaacgagaagctgtacctgtactacctgcagaacggccgggacatgtacgtggaccaggagctggacatcaaccggctgtccgactacgacgtggaccacatcgtgccccagtccttcctgaaggacgactccatcgacaacaaggtgctgacccggtccgacaagaaccggggcaagtccgacaacgtgccctccgaggaggtggtgaagaagatgaagaactactggcggcagctgctgaacgccaagctgatcacccagcggaagttcgacaacctgaccaaggccgagcggggcggcctgtccgagctggacaaggccggcttcatcaagcggcagctggtggagacccggcagatcaccaagcacgtggcccagatcctggactcccggatgaacaccaagtacgacgagaacgacaagctgatccgggaggtgaaggtgatcaccctgaagtccaagctggtgtccgacttccggaaggacttccagttctacaaggtgcgggagatcaacaactaccaccacgcccacgacgcctacctgaacgccgtggtgggcaccgccctgatcaagaagtaccccaagctggagtccgagttcgtgtacggcgactacaaggtgtacgacgtgcggaagatgatcgccaagtccgagcaggagatcggcaaggccaccgccaagtacttcttctactccaacatcatgaacttcttcaagaccgagatcaccctggccaacggcgagatccggaagcggcccctgatcgagaccaacggcgagaccggcgagatcgtgtgggacaagggccgggacttcgccaccgtgcggaaggtgctgtccatgccccaggtgaacatcgtgaagaagaccgaggtgcagaccggcggcttctccaaggagtccatcctgcccaagcggaactccgacaagctgatcgcccggaagaaggactgggaccccaagaagtacggcggcttcgactcccccaccgtggcctactccgtgctggtggtggccaaggtggagaagggcaagtccaagaagctgaagtccgtgaaggagctgctgggcatcaccatcatggagcggtcctccttcgagaagaaccccatcgacttcctggaggccaagggctacaaggaggtgaagaaggacctgatcatcaagctgcccaagtactccctgttcgagctggagaacggccggaagcggatgctggcctccgccggcgagctgcagaagggcaacgagctggccctgccctccaagtacgtgaacttcctgtacctggcctcccactacgagaagctgaagggctcccccgaggacaacgagcagaagcagctgttcgtggagcagcacaagcactacctggacgagatcatcgagcagatctccgagttctccaagcgggtgatcctggccgacgccaacctggacaaggtgctgtccgcctacaacaagcaccgggacaagcccatccgggagcaggccgagaacatcatccacctgttcaccctgaccaacctgggcgcccccgccgccttcaagtacttcgacaccaccatcgaccggaagcggtacacctccaccaaggaggtgctggacgccaccctgatccaccagtccatcaccggcctgtacgagacccggatcgacctgtcccagctgggcggcgactccggcggctccggcggctccggcggctccaccaacctgtccgacatcatcgagaaggagaccggcaagcagctggtgatccaggagtccatcctgatgctgcccgaggaggtggaggaggtgatcggcaacaagcccgagtccgacatcctggtgcacaccgcctacgacgagtccaccgacgagaacgtgatgctgctgacctccgacgcccccgagtacaagccctgggccctggtgatccaggactccaacggcgagaacaagatcaagatgctgtccggcggctccggcggctccggcggctccaccaacctgtccgacatcatcgagaaggagaccggcaagcagctggtgatccaggagtccatcctgatgctgcccgaggaggtggaggaggtgatcggcaacaagcccgagtccgacatcctggtgcacaccgcctacgacgagtccaccgacgagaacgtgatgctgctgacctccgacgcccccgagtacaagccctgggccctggtgatccaggactccaacggcgagaacaagatcaagatgctgtccggcggctccaagcggaccgccgacggctccgagttcgagcccaagaagaagcggaaggtgtgatagctagcaccagcctcaagaacacccgaatggagtctctaagctacataataccaacttacactttacaaaatgttgtcccccaaaatgtagccattcgtatctgctcctaataaaaagaaagtttcttcacattctctcgagaaaaaaaaaaaatggaaaaaaaaaaaacggaaaaaaaaaaaaggtaaaaaaaaaaaatataaaaaaaaaaaacataaaaaaaaaaaacgaaaaaaaaaaaacgtaaaaaaaaaaaactcaaaaaaaaaaaagataaaaaaaaaaaacctaaaaaaaaaaaatgtaaaaaaaaaaaagggaaaaaaaaaaaacgcaaaaaaaaaaaacacaaaaaaaaaaaatgcaaaaaaaaaaaatcgaaaaaaaaaaaatctaaaaaaaaaaaacgaaaaaaaaaaaacccaaaaaaaaaaaagacaaaaaaaaaaaatagaaaaaaaaaaaagttaaaaaaaaaaaactgaaaaaaaaaaaatttaaaaaaaaaaaatctag

SEQ ID NO: 20 - RNA, 5565 nt, synthetic construct
  source 1..5565: mol_type = other RNA
atgaagcggaccgccgacggctccgagttcgagtcccccaagaagaagcggaaggtgtcctccgagaccggccccgtggccgtggaccccaccctgcggcggcggatcgagccccacgagttcgaggtgttcttcgacccccgggagctgcggaaggagacctgcctgctgtacgagatcaactggggcggccggcactccatctggcggcacacctcccagaacaccaacaagcacgtggaggtgaacttcatcgagaagttcaccaccgagcggtacttctgccccaacacccggtgctccatcacctggttcctgtcctggtccccctgcggcgagtgctcccgggccatcaccgagttcctgtcccggtacccccacgtgaccctgttcatctacatcgcccggctgtaccaccacgccgacccccggaaccggcagggcctgcgggacctgatctcctccggcgtgaccatccagatcatgaccgagcaggagtccggctactgctggcggaacttcgtgaactactccccctccaacgaggcccactggccccggtacccccacctgtgggtgcggctgtacgtgctggagctgtactgcatcatcctgggcctgcccccctgcctgaacatcctgcggcggaagcagccccagctgaccttcttcaccatcgccctgcagtcctgccactaccagcggctgcccccccacatcctgtgggccaccggcctgaagtccggcggctcctccggcggctcctccggctccgagacccccggcacctccgagtccgccacccccgagtcctccggcggctcctccggcggctccgacaagaagtactccatcggcctggccatcggcaccaactccgtgggctgggccgtgatcaccgacgagtacaaggtgccctccaagaagttcaaggtgctgggcaacaccgaccggcactccatcaagaagaacctgatcggcgccctgctgttcgactccggcgagaccgccgaggccacccggctgaagcggaccgcccggcggcggtacacccggcggaagaaccggatctgctacctgcaggagatcttctccaacgagatggccaaggtggacgactccttcttccaccggctggaggagtccttcctggtggaggaggacaagaagcacgagcggcaccccatcttcggcaacatcgtggacgaggtggcctaccacgagaagtaccccaccatctaccacctgcggaagaagctggtggactccaccgacaaggccgacctgcggctgatctacctggccctggcccacatgatcaagttccggggccacttcctgatcgagggcgacctgaaccccgacaactccgacgtggacaagctgttcatccagctggtgcagacctacaaccagctgttcgaggagaaccccatcaacgcctccggcgtggacgccaaggccatcctgtccgcccggctgtccaagtcccggcggctggagaacctgatcgcccagctgcccggcgagaagaagaacggcctgttcggcaacctgatcgccctgtccctgggcctgacccccaacttcaagtccaacttcgacctggccgaggacgccaagctgcagctgtccaaggacacctacgacgacgacctggacaacctgctggcccagatcggcgaccagtacgccgacctgttcctggccgccaagaacctgtccgacgccatcctgctgtccgacatcctgcgggtgaacaccgagatcaccaaggcccccctgtccgcctccatgatcaagcggtacgacgagcaccaccaggacctgaccctgctgaaggccctggtgcggcagcagctgcccgagaagtacaaggagatcttcttcgaccagtccaagaacggctacgccggctacatcgacggcggcgcctcccaggaggagttctacaagttcatcaagcccatcctggagaagatggacggcaccgaggagctgctggtgaagctgaaccgggaggacctgctgcggaagcagcggaccttcgacaacggctccatcccccaccagatccacctgggcgagctgcacgccatcctgcggcggcaggaggacttctaccccttcctgaaggacaaccgggagaagatcgagaagatcctgaccttccggatcccctactacgtgggccccctggcccggggcaactcccggttcgcctggatgacccggaagtccgaggagaccatcaccccctggaacttcgaggaggtggtggacaagggcgcctccgcccagtccttcatcgagcggatgaccaacttcgacaagaacctgcccaacgagaaggtgctgcccaagcactccctgctgtacgagtacttcaccgtgtacaacgagctgaccaaggtgaagtacgtgaccgagggcatgcggaagcccgccttcctgtccggcgagcagaagaaggccatcgtggacctgctgttcaagaccaaccggaaggtgaccgtgaagcagctgaaggaggactacttcaagaagatcgagtgcttcgactccgtggagatctccggcgtggaggaccggttcaacgcctccctgggcacctaccacgacctgctgaagatcatcaaggacaaggacttcctggacaacgaggagaacgaggacatcctggaggacatcgtgctgaccctgaccctgttcgaggaccgggagatgatcgaggagcggctgaagacctacgcccacctgttcgacgacaaggtgatgaagcagctgaagcggcggcggtacaccggctggggccggctgtcccggaagctgatcaacggcatccgggacaagcagtccggcaagaccatcctggacttcctgaagtccgacggcttcgccaaccggaacttcatgcagctgatccacgacgactccctgaccttcaaggaggacatccagaaggcccaggtgtccggccagggcgactccctgcacgagcacatcgccaacctggccggctcccccgccatcaagaagggcatcctgcagaccgtgaaggtggtggacgagctggtgaaggtgatgggccggcacaagcccgagaacatcgtgatcgagatggcccgggagaaccagaccacccagaagggccagaagaactcccgggagcggatgaagcggatcgaggagggcatcaaggagctgggctcccagatcctgaaggagcaccccgtggagaacacccagctgcagaacgagaagctgtacctgtactacctgcagaacggccgggacatgtacgtggaccaggagctggacatcaaccggctgtccgactacgacgtggaccacatcgtgccccagtccttcctgaaggacgactccatcgacaacaaggtgctgacccggtccgacaagaaccggggcaagtccgacaacgtgccctccgaggaggtggtgaagaagatgaagaactactggcggcagctgctgaacgccaagctgatcacccagcggaagttcgacaacctgaccaaggccgagcggggcggcctgtccgagctggacaaggccggcttcatcaagcggcagctggtggagacccggcagatcaccaagcacgtggcccagatcctggactcccggatgaacaccaagtacgacgagaacgacaagctgatccgggaggtgaaggtgatcaccctgaagtccaagctggtgtccgacttccggaaggacttccagttctacaaggtgcgggagatcaacaactaccaccacgcccacgacgcctacctgaacgccgtggtgggcaccgccctgatcaagaagtaccccaagctggagtccgagttcgtgtacggcgactacaaggtgtacgacgtgcggaagatgatcgccaagtccgagcaggagatcggcaaggccaccgccaagtacttcttctactccaacatcatgaacttcttcaagaccgagatcaccctggccaacggcgagatccggaagcggcccctgatcgagaccaacggcgagaccggcgagatcgtgtgggacaagggccgggacttcgccaccgtgcggaaggtgctgtccatgccccaggtgaacatcgtgaagaagaccgaggtgcagaccggcggcttctccaaggagtccatcctgcccaagcggaactccgacaagctgatcgcccggaagaaggactgggaccccaagaagtacggcggcttcgactcccccaccgtggcctactccgtgctggtggtggccaaggtggagaagggcaagtccaagaagctgaagtccgtgaaggagctgctgggcatcaccatcatggagcggtcctccttcgagaagaaccccatcgacttcctggaggccaagggctacaaggaggtgaagaaggacctgatcatcaagctgcccaagtactccctgttcgagctggagaacggccggaagcggatgctggcctccgccggcgagctgcagaagggcaacgagctggccctgccctccaagtacgtgaacttcctgtacctggcctcccactacgagaagctgaagggctcccccgaggacaacgagcagaagcagctgttcgtggagcagcacaagcactacctggacgagatcatcgagcagatctccgagttctccaagcgggtgatcctggccgacgccaacctggacaaggtgctgtccgcctacaacaagcaccgggacaagcccatccgggagcaggccgagaacatcatccacctgttcaccctgaccaacctgggcgcccccgccgccttcaagtacttcgacaccaccatcgaccggaagcggtacacctccaccaaggaggtgctggacgccaccctgatccaccagtccatcaccggcctgtacgagacccggatcgacctgtcccagctgggcggcgactccggcggctccggcggctccggcggctccaccaacctgtccgacatcatcgagaaggagaccggcaagcagctggtgatccaggagtccatcctgatgctgcccgaggaggtggaggaggtgatcggcaacaagcccgagtccgacatcctggtgcacaccgcctacgacgagtccaccgacgagaacgtgatgctgctgacctccgacgcccccgagtacaagccctgggccctggtgatccaggactccaacggcgagaacaagatcaagatgctgtccggcggctccggcggctccggcggctccaccaacctgtccgacatcatcgagaaggagaccggcaagcagctggtgatccaggagtccatcctgatgctgcccgaggaggtggaggaggtgatcggcaacaagcccgagtccgacatcctggtgcacaccgcctacgacgagtccaccgacgagaacgtgatgctgctgacctccgacgcccccgagtacaagccctgggccctggtgatccaggactccaacggcgagaacaagatcaagatgctgtccggcggctccaagcggaccgccgacggctccgagttcgagcccaagaagaagcggaaggtgtgatag

SEQ ID NO: 21 - protein, 1853 aa, synthetic construct
MKRTADGSEFESPKKKRKVSSETGPVAVDPTLRRRIEPHEFEVFFDPRELRKETCLLYEINWGGRHSIWRHTSQNTNKHVEVNFIEKFTTERYFCPNTRCSITWFLSWSPCGECSRAITEFLSRYPHVTLFIYIARLYHHADPRNRQGLRDLISSGVTIQIMTEQESGYCWRNFVNYSPSNEAHWPRYPHLWVRLYVLELYCIILGLPPCLNILRRKQPQLTFFTIALQSCHYQRLPPHILWATGLKSGGSSGGSSGSETPGTSESATPESSGGSSGGSDKKYSIGLAIGTNSVGWAVITDEYKVPSKKFKVLGNTDRHSIKKNLIGALLFDSGETAEATRLKRTARRRYTRRKNRICYLQEIFSNEMAKVDDSFFHRLEESFLVEEDKKHERHPIFGNIVDEVAYHEKYPTIYHLRKKLVDSTDKADLRLIYLALAHMIKFRGHFLIEGDLNPDNSDVDKLFIQLVQTYNQLFEENPINASGVDAKAILSARLSKSRRLENLIAQLPGEKKNGLFGNLIALSLGLTPNFKSNFDLAEDAKLQLSKDTYDDDLDNLLAQIGDQYADLFLAAKNLSDAILLSDILRVNTEITKAPLSASMIKRYDEHHQDLTLLKALVRQQLPEKYKEIFFDQSKNGYAGYIDGGASQEEFYKFIKPILEKMDGTEELLVKLNREDLLRKQRTFDNGSIPHQIHLGELHAILRRQEDFYPFLKDNREKIEKILTFRIPYYVGPLARGNSRFAWMTRKSEETITPWNFEEVVDKGASAQSFIERMTNFDKNLPNEKVLPKHSLLYEYFTVYNELTKVKYVTEGMRKPAFLSGEQKKAIVDLLFKTNRKVTVKQLKEDYFKKIECFDSVEISGVEDRFNASLGTYHDLLKIIKDKDFLDNEENEDILEDIVLTLTLFEDREMIEERLKTYAHLFDDKVMKQLKRRRYTGWGRLSRKLINGIRDKQSGKTILDFLKSDGFANRNFMQLIHDDSLTFKEDIQKAQVSGQGDSLHEHIANLAGSPAIKKGILQTVKVVDELVKVMGRHKPENIVIEMARENQTTQKGQKNSRERMKRIEEGIKELGSQILKEHPVENTQLQNEKLYLYYLQNGRDMYVDQELDINRLSDYDVDHIVPQSFLKDDSIDNKVLTRSDKNRGKSDNVPSEEVVKKMKNYWRQLLNAKLITQRKFDNLTKAERGGLSELDKAGFIKRQLVETRQITKHVAQILDSRMNTKYDENDKLIREVKVITLKSKLVSDFRKDFQFYKVREINNYHHAHDAYLNAVVGTALIKKYPKLESEFVYGDYKVYDVRKMIAKSEQEIGKATAKYFFYSNIMNFFKTEITLANGEIRKRPLIETNGETGEIVWDKGRDFATVRKVLSMPQVNIVKKTEVQTGGFSKESILPKRNSDKLIARKKDWDPKKYGGFDSPTVAYSVLVVAKVEKGKSKKLKSVKELLGITIMERSSFEKNPIDFLEAKGYKEVKKDLIIKLPKYSLFELENGRKRMLASAGELQKGNELALPSKYVNFLYLASHYEKLKGSPEDNEQKQLFVEQHKHYLDEIIEQISEFSKRVILADANLDKVLSAYNKHRDKPIREQAENIIHLFTLTNLGAPAAFKYFDTTIDRKRYTSTKEVLDATLIHQSITGLYETRIDLSQLGGDSGGSGGSGGSTNLSDIIEKETGKQLVIQESILMLPEEVEEVIGNKPESDILVHTAYDESTDENVMLLTSDAPEYKPWALVIQDSNGENKIKMLSGGSGGSGGSTNLSDIIEKETGKQLVIQESILMLPEEVEEVIGNKPESDILVHTAYDESTDENVMLLTSDAPEYKPWALVIQDSNGENKIKMLSGGSKRTADGSEFEPKKKRKV

SEQ ID NO: 22 - protein, 199 aa, synthetic construct
MEASPASGPRHLMDPHIFTSNFNNGIGRHKTYLCYEVERLDNGTSVKMDQHRGFLHNQAKNLLCGFYGRHAELRFLDLVPSLQLDPAQIYRVTWFISWSPCFSWGCAGEVRAFLQENTHVRLRIFAARIYDYDPLYKEALQMLRDAGAQVSIMTYDEFKHCWDTFVDHQGCPFQPWDGLDEHSQALSGRLRAILQNQGN

SEQ ID NO: 23 - skipped

SEQ ID NO: 24 - protein, 83 aa, synthetic construct
TNLSDIIEKETGKQLVIQESILMLPEEVEEVIGNKPESDILVHTAYDESTDENVMLLTSDAPEYKPWALVIQDSNGENKIKML

SEQ ID NO: 25 - protein, 16 aa, synthetic construct
SGSETPGTSESATPES

SEQ ID NO: 26 - protein, 12 aa, synthetic construct
SGSETPGTSESA

SEQ ID NO: 27 - protein, 21 aa, synthetic construct
SGSETPGTSESATPEGGSGGS

SEQ ID NO: 28 - protein, 15 aa, synthetic construct
GGGGSEAAAKEAAAK

SEQ ID NO: 29 - protein, 15 aa, synthetic construct
EAAAKGGGGSGGGGS

SEQ ID NO: 30 - protein, 15 aa, synthetic construct
EAAAKEAAAKEAAAK

SEQ ID NO: 31 - protein, 20 aa, synthetic construct
GGGGSGGGGSGGGGSGGGGS

SEQ ID NO: 32 - protein, 20 aa, synthetic construct
GGGGSGGGGSEAAAKEAAAK

SEQ ID NO: 33 - protein, 20 aa, synthetic construct
GGGGSEAAAKGGGGSGGGGS

SEQ ID NO: 34 - protein, 25 aa, synthetic construct
EAAAKEAAAKEAAAKGGGGSGGGGS

SEQ ID NO: 35 - protein, 20 aa, synthetic construct
EAAAKEAAAKEAAAKEAAAK

SEQ ID NO: 36 - protein, 25 aa, synthetic construct
GGGGSEAAAKEAAAKGGGGSEAAAK

SEQ ID NO: 37 - protein, 25 aa, synthetic construct
EAAAKEAAAKGGGGSGGGGSGGGGS

SEQ ID NO: 38 - protein, 25 aa, synthetic construct
EAAAKEAAAKGGGGSGGGGSEAAAK

SEQ ID NO: 39 - protein, 4 aa, synthetic construct
SGGS

SEQ ID NO: 40 - protein, 7 aa, Simian virus 40
PKKKRKV

SEQ ID NO: 41 - protein, 1379 aa, synthetic construct
MDKKYSIGLAIGTNSVGWAVITDEYKVPSKKFKVLGNTDRHSIKKNLIGALLFDSGETAEATRLKRTARRRYTRRKNRICYLQEIFSNEMAKVDDSFFHRLEESFLVEEDKKHERHPIFGNIVDEVAYHEKYPTIYHLRKKLVDSTDKADLRLIYLALAHMIKFRGHFLIEGDLNPDNSDVDKLFIQLVQTYNQLFEENPINASGVDAKAILSARLSKSRRLENLIAQLPGEKKNGLFGNLIALSLGLTPNFKSNFDLAEDAKLQLSKDTYDDDLDNLLAQIGDQYADLFLAAKNLSDAILLSDILRVNTEITKAPLSASMIKRYDEHHQDLTLLKALVRQQLPEKYKEIFFDQSKNGYAGYIDGGASQEEFYKFIKPILEKMDGTEELLVKLNREDLLRKQRTFDNGSIPHQIHLGELHAILRRQEDFYPFLKDNREKIEKILTFRIPYYVGPLARGNSRFAWMTRKSEETITPWNFEEVVDKGASAQSFIERMTNFDKNLPNEKVLPKHSLLYEYFTVYNELTKVKYVTEGMRKPAFLSGEQKKAIVDLLFKTNRKVTVKQLKEDYFKKIECFDSVEISGVEDRFNASLGTYHDLLKIIKDKDFLDNEENEDILEDIVLTLTLFEDREMIEERLKTYAHLFDDKVMKQLKRRRYTGWGRLSRKLINGIRDKQSGKTILDFLKSDGFANRNFMQLIHDDSLTFKEDIQKAQVSGQGDSLHEHIANLAGSPAIKKGILQTVKVVDELVKVMGRHKPENIVIEMARENQTTQKGQKNSRERMKRIEEGIKELGSQILKEHPVENTQLQNEKLYLYYLQNGRDMYVDQELDINRLSDYDVDHIVPQSFLKDDSIDNKVLTRSDKNRGKSDNVPSEEVVKKMKNYWRQLLNAKLITQRKFDNLTKAERGGLSELDKAGFIKRQLVETRQITKHVAQILDSRMNTKYDENDKLIREVKVITLKSKLVSDFRKDFQFYKVREINNYHHAHDAYLNAVVGTALIKKYPKLESEFVYGDYKVYDVRKMIAKSEQEIGKATAKYFFYSNIMNFFKTEITLANGEIRKRPLIETNGETGEIVWDKGRDFATVRKVLSMPQVNIVKKTEVQTGGFSKESILPKRNSDKLIARKKDWDPKKYGGFDSPTVAYSVLVVAKVEKGKSKKLKSVKELLGITIMERSSFEKNPIDFLEAKGYKEVKKDLIIKLPKYSLFELENGRKRMLASAGELQKGNELALPSKYVNFLYLASHYEKLKGSPEDNEQKQLFVEQHKHYLDEIIEQISEFSKRVILADANLDKVLSAYNKHRDKPIREQAENIIHLFTLTNLGAPAAFKYFDTTIDRKRYTSTKEVLDATLIHQSITGLYETRIDLSQLGGDGGGSPKKKRKV

SEQ ID NO: 42 - RNA, 4134 nt, synthetic construct
  source 1..4134: mol_type = other RNA
gacaagaagtacagcatcggactggcaatcggaacaaacagcgtcggatgggcagtcatcacagacgaatacaaggtcccgagcaagaagttcaaggtcctgggaaacacagacagacacagcatcaagaagaacctgatcggagcactgctgttcgacagcggagaaacagcagaagcaacaagactgaagagaacagcaagaagaagatacacaagaagaaagaacagaatctgctacctgcaggaaatcttcagcaacgaaatggcaaaggtcgacgacagcttcttccacagactggaagaaagcttcctggtcgaagaagacaagaagcacgaaagacacccgatcttcggaaacatcgtcgacgaagtcgcataccacgaaaagtacccgacaatctaccacctgagaaagaagctggtcgacagcacagacaaggcagacctgagactgatctacctggcactggcacacatgatcaagttcagaggacacttcctgatcgaaggagacctgaacccggacaacagcgacgtcgacaagctgttcatccagctggtccagacatacaaccagctgttcgaagaaaacccgatcaacgcaagcggagtcgacgcaaaggcaatcctgagcgcaagactgagcaagagcagaagactggaaaacctgatcgcacagctgccgggagaaaagaagaacggactgttcggaaacctgatcgcactgagcctgggactgacaccgaacttcaagagcaacttcgacctggcagaagacgcaaagctgcagctgagcaaggacacatacgacgacgacctggacaacctgctggcacagatcggagaccagtacgcagacctgttcctggcagcaaagaacctgagcgacgcaatcctgctgagcgacatcctgagagtcaacacagaaatcacaaaggcaccgctgagcgcaagcatgatcaagagatacgacgaacaccaccaggacctgacactgctgaaggcactggtcagacagcagctgccggaaaagtacaaggaaatcttcttcgaccagagcaagaacggatacgcaggatacatcgacggaggagcaagccaggaagaattctacaagttcatcaagccgatcctggaaaagatggacggaacagaagaactgctggtcaagctgaacagagaagacctgctgagaaagcagagaacattcgacaacggaagcatcccgcaccagatccacctgggagaactgcacgcaatcctgagaagacaggaagacttctacccgttcctgaaggacaacagagaaaagatcgaaaagatcctgacattcagaatcccgtactacgtcggaccgctggcaagaggaaacagcagattcgcatggatgacaagaaagagcgaagaaacaatcacaccgtggaacttcgaagaagtcgtcgacaagggagcaagcgcacagagcttcatcgaaagaatgacaaacttcgacaagaacctgccgaacgaaaaggtcctgccgaagcacagcctgctgtacgaatacttcacagtctacaacgaactgacaaaggtcaagtacgtcacagaaggaatgagaaagccggcattcctgagcggagaacagaagaaggcaatcgtcgacctgctgttcaagacaaacagaaaggtcacagtcaagcagctgaaggaagactacttcaagaagatcgaatgcttcgacagcgtcgaaatcagcggagtcgaagacagattcaacgcaagcctgggaacataccacgacctgctgaagatcatcaaggacaaggacttcctggacaacgaagaaaacgaagacatcctggaagacatcgtcctgacactgacactgttcgaagacagagaaatgatcgaagaaagactgaagacatacgcacacctgttcgacgacaaggtcatgaagcagctgaagagaagaagatacacaggatggggaagactgagcagaaagctgatcaacggaatcagagacaagcagagcggaaagacaatcctggacttcctgaagagcgacggattcgcaaacagaaacttcatgcagctgatccacgacgacagcctgacattcaaggaagacatccagaaggcacaggtcagcggacagggagacagcctgcacgaacacatcgcaaacctggcaggaagcccggcaatcaagaagggaatcctgcagacagtcaaggtcgtcgacgaactggtcaaggtcatgggaagacacaagccggaaaacatcgtcatcgaaatggcaagagaaaaccagacaacacagaagggacagaagaacagcagagaaagaatgaagagaatcgaagaaggaatcaaggaactgggaagccagatcctgaaggaacacccggtcgaaaacacacagctgcagaacgaaaagctgtacctgtactacctgcagaacggaagagacatgtacgtcgaccaggaactggacatcaacagactgagcgactacgacgtcgaccacatcgtcccgcagagcttcctgaaggacgacagcatcgacaacaaggtcctgacaagaagcgacaagaacagaggaaagagcgacaacgtcccgagcgaagaagtcgtcaagaagatgaagaactactggagacagctgctgaacgcaaagctgatcacacagagaaagttcgacaacctgacaaaggcagagagaggaggactgagcgaactggacaaggcaggattcatcaagagacagctggtcgaaacaagacagatcacaaagcacgtcgcacagatcctggacagcagaatgaacacaaagtacgacgaaaacgacaagctgatcagagaagtcaaggtcatcacactgaagagcaagctggtcagcgacttcagaaaggacttccagttctacaaggtcagagaaatcaacaactaccaccacgcacacgacgcatacctgaacgcagtcgtcggaacagcactgatcaagaagtacccgaagctggaaagcgaattcgtctacggagactacaaggtctacgacgtcagaaagatgatcgcaaagagcgaacaggaaatcggaaaggcaacagcaaagtacttcttctacagcaacatcatgaacttcttcaagacagaaatcacactggcaaacggagaaatcagaaagagaccgctgatcgaaacaaacggagaaacaggagaaatcgtctgggacaagggaagagacttcgcaacagtcagaaaggtcctgagcatgccgcaggtcaacatcgtcaagaagacagaagtccagacaggaggattcagcaaggaaagcatcctgccgaagagaaacagcgacaagctgatcgcaagaaagaaggactgggacccgaagaagtacggaggattcgacagcccgacagtcgcatacagcgtcctggtcgtcgcaaaggtcgaaaagggaaagagcaagaagctgaagagcgtcaaggaactgctgggaatcacaatcatggaaagaagcagcttcgaaaagaacccgatcgacttcctggaagcaaagggatacaaggaagtcaagaaggacctgatcatcaagctgccgaagtacagcctgttcgaactggaaaacggaagaaagagaatgctggcaagcgcaggagaactgcagaagggaaacgaactggcactgccgagcaagtacgtcaacttcctgtacctggcaagccactacgaaaagctgaagggaagcccggaagacaacgaacagaagcagctgttcgtcgaacagcacaagcactacctggacgaaatcatcgaacagatcagcgaattcagcaagagagtcatcctggcagacgcaaacctggacaaggtcctgagcgcatacaacaagcacagagacaagccgatcagagaacaggcagaaaacatcatccacctgttcacactgacaaacctgggagcaccggcagcattcaagtacttcgacacaacaatcgacagaaagagatacacaagcacaaaggaagtcctggacgcaacactgatccaccagagcatcacaggactgtacgaaacaagaatcgacctgagccagctgggaggagacggaggaggaagcccgaagaagaagagaaaggtc

SEQ ID NO: 43 - protein, 1368 aa, synthetic construct
MDKKYSIGLAIGTNSVGWAVITDEYKVPSKKFKVLGNTDRHSIKKNLIGALLFDSGETAEATRLKRTARRRYTRRKNRICYLQEIFSNEMAKVDDSFFHRLEESFLVEEDKKHERHPIFGNIVDEVAYHEKYPTIYHLRKKLVDSTDKADLRLIYLALAHMIKFRGHFLIEGDLNPDNSDVDKLFIQLVQTYNQLFEENPINASGVDAKAILSARLSKSRRLENLIAQLPGEKKNGLFGNLIALSLGLTPNFKSNFDLAEDAKLQLSKDTYDDDLDNLLAQIGDQYADLFLAAKNLSDAILLSDILRVNTEITKAPLSASMIKRYDEHHQDLTLLKALVRQQLPEKYKEIFFDQSKNGYAGYIDGGASQEEFYKFIKPILEKMDGTEELLVKLNREDLLRKQRTFDNGSIPHQIHLGELHAILRRQEDFYPFLKDNREKIEKILTFRIPYYVGPLARGNSRFAWMTRKSEETITPWNFEEVVDKGASAQSFIERMTNFDKNLPNEKVLPKHSLLYEYFTVYNELTKVKYVTEGMRKPAFLSGEQKKAIVDLLFKTNRKVTVKQLKEDYFKKIECFDSVEISGVEDRFNASLGTYHDLLKIIKDKDFLDNEENEDILEDIVLTLTLFEDREMIEERLKTYAHLFDDKVMKQLKRRRYTGWGRLSRKLINGIRDKQSGKTILDFLKSDGFANRNFMQLIHDDSLTFKEDIQKAQVSGQGDSLHEHIANLAGSPAIKKGILQTVKVVDELVKVMGRHKPENIVIEMARENQTTQKGQKNSRERMKRIEEGIKELGSQILKEHPVENTQLQNEKLYLYYLQNGRDMYVDQELDINRLSDYDVDHIVPQSFLKDDSIDNKVLTRSDKNRGKSDNVPSEEVVKKMKNYWRQLLNAKLITQRKFDNLTKAERGGLSELDKAGFIKRQLVETRQITKHVAQILDSRMNTKYDENDKLIREVKVITLKSKLVSDFRKDFQFYKVREINNYHHAHDAYLNAVVGTALIKKYPKLESEFVYGDYKVYDVRKMIAKSEQEIGKATAKYFFYSNIMNFFKTEITLANGEIRKRPLIETNGETGEIVWDKGRDFATVRKVLSMPQVNIVKKTEVQTGGFSKESILPKRNSDKLIARKKDWDPKKYGGFDSPTVAYSVLVVAKVEKGKSKKLKSVKELLGITIMERSSFEKNPIDFLEAKGYKEVKKDLIIKLPKYSLFELENGRKRMLASAGELQKGNELALPSKYVNFLYLASHYEKLKGSPEDNEQKQLFVEQHKHYLDEIIEQISEFSKRVILADANLDKVLSAYNKHRDKPIREQAENIIHLFTLTNLGAPAAFKYFDTTIDRKRYTSTKEVLDATLIHQSITGLYETRIDLSQLGGD

SEQ ID NO: 44 - RNA, 4101 nt, synthetic construct
  source 1..4101: mol_type = other RNA
gacaagaagtacagcatcggactggcaatcggaacaaacagcgtcggatgggcagtcatcacagacgaatacaaggtcccgagcaagaagttcaaggtcctgggaaacacagacagacacagcatcaagaagaacctgatcggagcactgctgttcgacagcggagaaacagcagaagcaacaagactgaagagaacagcaagaagaagatacacaagaagaaagaacagaatctgctacctgcaggaaatcttcagcaacgaaatggcaaaggtcgacgacagcttcttccacagactggaagaaagcttcctggtcgaagaagacaagaagcacgaaagacacccgatcttcggaaacatcgtcgacgaagtcgcataccacgaaaagtacccgacaatctaccacctgagaaagaagctggtcgacagcacagacaaggcagacctgagactgatctacctggcactggcacacatgatcaagttcagaggacacttcctgatcgaaggagacctgaacccggacaacagcgacgtcgacaagctgttcatccagctggtccagacatacaaccagctgttcgaagaaaacccgatcaacgcaagcggagtcgacgcaaaggcaatcctgagcgcaagactgagcaagagcagaagactggaaaacctgatcgcacagctgccgggagaaaagaagaacggactgttcggaaacctgatcgcactgagcctgggactgacaccgaacttcaagagcaacttcgacctggcagaagacgcaaagctgcagctgagcaaggacacatacgacgacgacctggacaacctgctggcacagatcggagaccagtacgcagacctgttcctggcagcaaagaacctgagcgacgcaatcctgctgagcgacatcctgagagtcaacacagaaatcacaaaggcaccgctgagcgcaagcatgatcaagagatacgacgaacaccaccaggacctgacactgctgaaggcactggtcagacagcagctgccggaaaagtacaaggaaatcttcttcgaccagagcaagaacggatacgcaggatacatcgacggaggagcaagccaggaagaattctacaagttcatcaagccgatcctggaaaagatggacggaacagaagaactgctggtcaagctgaacagagaagacctgctgagaaagcagagaacattcgacaacggaagcatcccgcaccagatccacctgggagaactgcacgcaatcctgagaagacaggaagacttctacccgttcctgaaggacaacagagaaaagatcgaaaagatcctgacattcagaatcccgtactacgtcggaccgctggcaagaggaaacagcagattcgcatggatgacaagaaagagcgaagaaacaatcacaccgtggaacttcgaagaagtcgtcgacaagggagcaagcgcacagagcttcatcgaaagaatgacaaacttcgacaagaacctgccgaacgaaaaggtcctgccgaagcacagcctgctgtacgaatacttcacagtctacaacgaactgacaaaggtcaagtacgtcacagaaggaatgagaaagccggcattcctgagcggagaacagaagaaggcaatcgtcgacctgctgttcaagacaaacagaaaggtcacagtcaagcagctgaaggaagactacttcaagaagatcgaatgcttcgacagcgtcgaaatcagcggagtcgaagacagattcaacgcaagcctgggaacataccacgacctgctgaagatcatcaaggacaaggacttcctggacaacgaagaaaacgaagacatcctggaagacatcgtcctgacactgacactgttcgaagacagagaaatgatcgaagaaagactgaagacatacgcacacctgttcgacgacaaggtcatgaagcagctgaagagaagaagatacacaggatggggaagactgagcagaaagctgatcaacggaatcagagacaagcagagcggaaagacaatcctggacttcctgaagagcgacggattcgcaaacagaaacttcatgcagctgatccacgacgacagcctgacattcaaggaagacatccagaaggcacaggtcagcggacagggagacagcctgcacgaacacatcgcaaacctggcaggaagcccggcaatcaagaagggaatcctgcagacagtcaaggtcgtcgacgaactggtcaaggtcatgggaagacacaagccggaaaacatcgtcatcgaaatggcaagagaaaaccagacaacacagaagggacagaagaacagcagagaaagaatgaagagaatcgaagaaggaatcaaggaactgggaagccagatcctgaaggaacacccggtcgaaaacacacagctgcagaacgaaaagctgtacctgtactacctgcagaacggaagagacatgtacgtcgaccaggaactggacatcaacagactgagcgactacgacgtcgaccacatcgtcccgcagagcttcctgaaggacgacagcatcgacaacaaggtcctgacaagaagcgacaagaacagaggaaagagcgacaacgtcccgagcgaagaagtcgtcaagaagatgaagaactactggagacagctgctgaacgcaaagctgatcacacagagaaagttcgacaacctgacaaaggcagagagaggaggactgagcgaactggacaaggcaggattcatcaagagacagctggtcgaaacaagacagatcacaaagcacgtcgcacagatcctggacagcagaatgaacacaaagtacgacgaaaacgacaagctgatcagagaagtcaaggtcatcacactgaagagcaagctggtcagcgacttcagaaaggacttccagttctacaaggtcagagaaatcaacaactaccaccacgcacacgacgcatacctgaacgcagtcgtcggaacagcactgatcaagaagtacccgaagctggaaagcgaattcgtctacggagactacaaggtctacgacgtcagaaagatgatcgcaaagagcgaacaggaaatcggaaaggcaacagcaaagtacttcttctacagcaacatcatgaacttcttcaagacagaaatcacactggcaaacggagaaatcagaaagagaccgctgatcgaaacaaacggagaaacaggagaaatcgtctgggacaagggaagagacttcgcaacagtcagaaaggtcctgagcatgccgcaggtcaacatcgtcaagaagacagaagtccagacaggaggattcagcaaggaaagcatcctgccgaagagaaacagcgacaagctgatcgcaagaaagaaggactgggacccgaagaagtacggaggattcgacagcccgacagtcgcatacagcgtcctggtcgtcgcaaaggtcgaaaagggaaagagcaagaagctgaagagcgtcaaggaactgctgggaatcacaatcatggaaagaagcagcttcgaaaagaacccgatcgacttcctggaagcaaagggatacaaggaagtcaagaaggacctgatcatcaagctgccgaagtacagcctgttcgaactggaaaacggaagaaagagaatgctggcaagcgcaggagaactgcagaagggaaacgaactggcactgccgagcaagtacgtcaacttcctgtacctggcaagccactacgaaaagctgaagggaagcccggaagacaacgaacagaagcagctgttcgtcgaacagcacaagcactacctggacgaaatcatcgaacagatcagcgaattcagcaagagagtcatcctggcagacgcaaacctggacaaggtcctgagcgcatacaacaagcacagagacaagccgatcagagaacaggcagaaaacatcatccacctgttcacactgacaaacctgggagcaccggcagcattcaagtacttcgacacaacaatcgacagaaagagatacacaagcacaaaggaagtcctggacgcaacactgatccaccagagcatcacaggactgtacgaaacaagaatcgacctgagccagctgggaggagac

SEQ ID NO: 45 - protein, 1391 aa, synthetic construct
DKKYSIGLAIGTNSVGWAVITDEYKVPSKKFKVLGNTDRHSIKKNLIGALLFDSGETAEATRLKRTARRRYTRRKNRICYLQEIFSNEMAKVDDSFFHRLEESFLVEEDKKHERHPIFGNIVDEVAYHEKYPTIYHLRKKLVDSTDKADLRLIYLALAHMIKFRGHFLIEGDLNPDNSDVDKLFIQLVQTYNQLFEENPINASGVDAKAILSARLSKSRRLENLIAQLPGEKKNGLFGNLIALSLGLTPNFKSNFDLAEDAKLQLSKDTYDDDLDNLLAQIGDQYADLFLAAKNLSDAILLSDILRVNTEITKAPLSASMIKRYDEHHQDLTLLKALVRQQLPEKYKEIFFDQSKNGYAGYIDGGASQEEFYKFIKPILEKMDGTEELLVKLNREDLLRKQRTFDNGSIPHQIHLGELHAILRRQEDFYPFLKDNREKIEKILTFRIPYYVGPLARGNSRFAWMTRKSEETITPWNFEEVVDKGASAQSFIERMTNFDKNLPNEKVLPKHSLLYEYFTVYNELTKVKYVTEGMRKPAFLSGEQKKAIVDLLFKTNRKVTVKQLKEDYFKKIECFDSVEISGVEDRFNASLGTYHDLLKIIKDKDFLDNEENEDILEDIVLTLTLFEDREMIEERLKTYAHLFDDKVMKQLKRRRYTGWGRLSRKLINGIRDKQSGKTILDFLKSDGFANRNFMQLIHDDSLTFKEDIQKAQVSGQGDSLHEHIANLAGSPAIKKGILQTVKVVDELVKVMGRHKPENIVIEMARENQTTQKGQKNSRERMKRIEEGIKELGSQILKEHPVENTQLQNEKLYLYYLQNGRDMYVDQELDINRLSDYDVDHIVPQSFLKDDSIDNKVLTRSDKNRGKSDNVPSEEVVKKMKNYWRQLLNAKLITQRKFDNLTKAERGGLSELDKAGFIKRQLVETRQITKHVAQILDSRMNTKYDENDKLIREVKVITLKSKLVSDFRKDFQFYKVREINNYHHAHDAYLNAVVGTALIKKYPKLESEFVYGDYKVYDVRKMIAKSEQEIGKATAKYFFYSNIMNFFKTEITLANGEIRKRPLIETNGETGEIVWDKGRDFATVRKVLSMPQVNIVKKTEVQTGGFSKESILPKRNSDKLIARKKDWDPKKYGGFDSPTVAYSVLVVAKVEKGKSKKLKSVKELLGITIMERSSFEKNPIDFLEAKGYKEVKKDLIIKLPKYSLFELENGRKRMLASAGELQKGNELALPSKYVNFLYLASHYEKLKGSPEDNEQKQLFVEQHKHYLDEIIEQISEFSKRVILADANLDKVLSAYNKHRDKPIREQAENIIHLFTLTNLGAPAAFKYFDTTIDRKRYTSTKEVLDATLIHQSITGLYETRIDLSQLGGDGSGSPKKKRKVDGSPKKKRKVDSG

SEQ ID NO: 46 - RNA, 4173 nt, synthetic construct
  source 1..4173: mol_type = other RNA
gacaagaagtacagcatcggactggcaatcggaacaaacagcgtcggatgggcagtcatcacagacgaatacaaggtcccgagcaagaagttcaaggtcctgggaaacacagacagacacagcatcaagaagaacctgatcggagcactgctgttcgacagcggagaaacagcagaagcaacaagactgaagagaacagcaagaagaagatacacaagaagaaagaacagaatctgctacctgcaggaaatcttcagcaacgaaatggcaaaggtcgacgacagcttcttccacagactggaagaaagcttcctggtcgaagaagacaagaagcacgaaagacacccgatcttcggaaacatcgtcgacgaagtcgcataccacgaaaagtacccgacaatctaccacctgagaaagaagctggtcgacagcacagacaaggcagacctgagactgatctacctggcactggcacacatgatcaagttcagaggacacttcctgatcgaaggagacctgaacccggacaacagcgacgtcgacaagctgttcatccagctggtccagacatacaaccagctgttcgaagaaaacccgatcaacgcaagcggagtcgacgcaaaggcaatcctgagcgcaagactgagcaagagcagaagactggaaaacctgatcgcacagctgccgggagaaaagaagaacggactgttcggaaacctgatcgcactgagcctgggactgacaccgaacttcaagagcaacttcgacctggcagaagacgcaaagctgcagctgagcaaggacacatacgacgacgacctggacaacctgctggcacagatcggagaccagtacgcagacctgttcctggcagcaaagaacctgagcgacgcaatcctgctgagcgacatcctgagagtcaacacagaaatcacaaaggcaccgctgagcgcaagcatgatcaagagatacgacgaacaccaccaggacctgacactgctgaaggcactggtcagacagcagctgccggaaaagtacaaggaaatcttcttcgaccagagcaagaacggatacgcaggatacatcgacggaggagcaagccaggaagaattctacaagttcatcaagccgatcctggaaaagatggacggaacagaagaactgctggtcaagctgaacagagaagacctgctgagaaagcagagaacattcgacaacggaagcatcccgcaccagatccacctgggagaactgcacgcaatcctgagaagacaggaagacttctacccgttcctgaaggacaacagagaaaagatcgaaaagatcctgacattcagaatcccgtactacgtcggaccgctggcaagaggaaacagcagattcgcatggatgacaagaaagagcgaagaaacaatcacaccgtggaacttcgaagaagtcgtcgacaagggagcaagcgcacagagcttcatcgaaagaatgacaaacttcgacaagaacctgccgaacgaaaaggtcctgccgaagcacagcctgctgtacgaatacttcacagtctacaacgaactgacaaaggtcaagtacgtcacagaaggaatgagaaagccggcattcctgagcggagaacagaagaaggcaatcgtcgacctgctgttcaagacaaacagaaaggtcacagtcaagcagctgaaggaagactacttcaagaagatcgaatgcttcgacagcgtcgaaatcagcggagtcgaagacagattcaacgcaagcctgggaacataccacgacctgctgaagatcatcaaggacaaggacttcctggacaacgaagaaaacgaagacatcctggaagacatcgtcctgacactgacactgttcgaagacagagaaatgatcgaagaaagactgaagacatacgcacacctgttcgacgacaaggtcatgaagcagctgaagagaagaagatacacaggatggggaagactgagcagaaagctgatcaacggaatcagagacaagcagagcggaaagacaatcctggacttcctgaagagcgacggattcgcaaacagaaacttcatgcagctgatccacgacgacagcctgacattcaaggaagacatccagaaggcacaggtcagcggacagggagacagcctgcacgaacacatcgcaaacctggcaggaagcccggcaatcaagaagggaatcctgcagacagtcaaggtcgtcgacgaactggtcaaggtcatgggaagacacaagccggaaaacatcgtcatcgaaatggcaagagaaaaccagacaacacagaagggacagaagaacagcagagaaagaatgaagagaatcgaagaaggaatcaaggaactgggaagccagatcctgaaggaacacccggtcgaaaacacacagctgcagaacgaaaagctgtacctgtactacctgcagaacggaagagacatgtacgtcgaccaggaactggacatcaacagactgagcgactacgacgtcgaccacatcgtcccgcagagcttcctgaaggacgacagcatcgacaacaaggtcctgacaagaagcgacaagaacagaggaaagagcgacaacgtcccgagcgaagaagtcgtcaagaagatgaagaactactggagacagctgctgaacgcaaagctgatcacacagagaaagttcgacaacctgacaaaggcagagagaggaggactgagcgaactggacaaggcaggattcatcaagagacagctggtcgaaacaagacagatcacaaagcacgtcgcacagatcctggacagcagaatgaacacaaagtacgacgaaaacgacaagctgatcagagaagtcaaggtcatcacactgaagagcaagctggtcagcgacttcagaaaggacttccagttctacaaggtcagagaaatcaacaactaccaccacgcacacgacgcatacctgaacgcagtcgtcggaacagcactgatcaagaagtacccgaagctggaaagcgaattcgtctacggagactacaaggtctacgacgtcagaaagatgatcgcaaagagcgaacaggaaatcggaaaggcaacagcaaagtacttcttctacagcaacatcatgaacttcttcaagacagaaatcacactggcaaacggagaaatcagaaagagaccgctgatcgaaacaaacggagaaacaggagaaatcgtctgggacaagggaagagacttcgcaacagtcagaaaggtcctgagcatgccgcaggtcaacatcgtcaagaagacagaagtccagacaggaggattcagcaaggaaagcatcctgccgaagagaaacagcgacaagctgatcgcaagaaagaaggactgggacccgaagaagtacggaggattcgacagcccgacagtcgcatacagcgtcctggtcgtcgcaaaggtcgaaaagggaaagagcaagaagctgaagagcgtcaaggaactgctgggaatcacaatcatggaaagaagcagcttcgaaaagaacccgatcgacttcctggaagcaaagggatacaaggaagtcaagaaggacctgatcatcaagctgccgaagtacagcctgttcgaactggaaaacggaagaaagagaatgctggcaagcgcaggagaactgcagaagggaaacgaactggcactgccgagcaagtacgtcaacttcctgtacctggcaagccactacgaaaagctgaagggaagcccggaagacaacgaacagaagcagctgttcgtcgaacagcacaagcactacctggacgaaatcatcgaacagatcagcgaattcagcaagagagtcatcctggcagacgcaaacctggacaaggtcctgagcgcatacaacaagcacagagacaagccgatcagagaacaggcagaaaacatcatccacctgttcacactgacaaacctgggagcaccggcagcattcaagtacttcgacacaacaatcgacagaaagagatacacaagcacaaaggaagtcctggacgcaacactgatccaccagagcatcacaggactgtacgaaacaagaatcgacctgagccagctgggaggagacggaagcggaagcccgaagaagaagagaaaggtcgacggaagcccgaagaagaagagaaaggtcgacagcgga

SEQ ID NO: 47 - DNA, 4140 bp, synthetic construct
  source 1..4140: mol_type = other DNA
atggacaagaagtactccatcggcctggccatcggcaccaactccgtgggctgggccgtgatcaccgacgagtacaaggtgccctccaagaagttcaaggtgctgggcaacaccgaccggcactccatcaagaagaacctgatcggcgccctgctgttcgactccggcgagaccgccgaggccacccggctgaagcggaccgcccggcggcggtacacccggcggaagaaccggatctgctacctgcaggagatcttctccaacgagatggccaaggtggacgactccttcttccaccggctggaggagtccttcctggtggaggaggacaagaagcacgagcggcaccccatcttcggcaacatcgtggacgaggtggcctaccacgagaagtaccccaccatctaccacctgcggaagaagctggtggactccaccgacaaggccgacctgcggctgatctacctggccctggcccacatgatcaagttccggggccacttcctgatcgagggcgacctgaaccccgacaactccgacgtggacaagctgttcatccagctggtgcagacctacaaccagctgttcgaggagaaccccatcaacgcctccggcgtggacgccaaggccatcctgtccgcccggctgtccaagtcccggcggctggagaacctgatcgcccagctgcccggcgagaagaagaacggcctgttcggcaacctgatcgccctgtccctgggcctgacccccaacttcaagtccaacttcgacctggccgaggacgccaagctgcagctgtccaaggacacctacgacgacgacctggacaacctgctggcccagatcggcgaccagtacgccgacctgttcctggccgccaagaacctgtccgacgccatcctgctgtccgacatcctgcgggtgaacaccgagatcaccaaggcccccctgtccgcctccatgatcaagcggtacgacgagcaccaccaggacctgaccctgctgaaggccctggtgcggcagcagctgcccgagaagtacaaggagatcttcttcgaccagtccaagaacggctacgccggctacatcgacggcggcgcctcccaggaggagttctacaagttcatcaagcccatcctggagaagatggacggcaccgaggagctgctggtgaagctgaaccgggaggacctgctgcggaagcagcggaccttcgacaacggctccatcccccaccagatccacctgggcgagctgcacgccatcctgcggcggcaggaggacttctaccccttcctgaaggacaaccgggagaagatcgagaagatcctgaccttccggatcccctactacgtgggccccctggcccggggcaactcccggttcgcctggatgacccggaagtccgaggagaccatcaccccctggaacttcgaggaggtggtggacaagggcgcctccgcccagtccttcatcgagcggatgaccaacttcgacaagaacctgcccaacgagaaggtgctgcccaagcactccctgctgtacgagtacttcaccgtgtacaacgagctgaccaaggtgaagtacgtgaccgagggcatgcggaagcccgccttcctgtccggcgagcagaagaaggccatcgtggacctgctgttcaagaccaaccggaaggtgaccgtgaagcagctgaaggaggactacttcaagaagatcgagtgcttcgactccgtggagatctccggcgtggaggaccggttcaacgcctccctgggcacctaccacgacctgctgaagatcatcaaggacaaggacttcctggacaacgaggagaacgaggacatcctggaggacatcgtgctgaccctgaccctgttcgaggaccgggagatgatcgaggagcggctgaagacctacgcccacctgttcgacgacaaggtgatgaagcagctgaagcggcggcggtacaccggctggggccggctgtcccggaagctgatcaacggcatccgggacaagcagtccggcaagaccatcctggacttcctgaagtccgacggcttcgccaaccggaacttcatgcagctgatccacgacgactccctgaccttcaaggaggacatccagaaggcccaggtgtccggccagggcgactccctgcacgagcacatcgccaacctggccggctcccccgccatcaagaagggcatcctgcagaccgtgaaggtggtggacgagctggtgaaggtgatgggccggcacaagcccgagaacatcgtgatcgagatggcccgggagaaccagaccacccagaagggccagaagaactcccgggagcggatgaagcggatcgaggagggcatcaaggagctgggctcccagatcctgaaggagcaccccgtggagaacacccagctgcagaacgagaagctgtacctgtactacctgcagaacggccgggacatgtacgtggaccaggagctggacatcaaccggctgtccgactacgacgtggaccacatcgtgccccagtccttcctgaaggacgactccatcgacaacaaggtgctgacccggtccgacaagaaccggggcaagtccgacaacgtgccctccgaggaggtggtgaagaagatgaagaactactggcggcagctgctgaacgccaagctgatcacccagcggaagttcgacaacctgaccaaggccgagcggggcggcctgtccgagctggacaaggccggcttcatcaagcggcagctggtggagacccggcagatcaccaagcacgtggcccagatcctggactcccggatgaacaccaagtacgacgagaacgacaagctgatccgggaggtgaaggtgatcaccctgaagtccaagctggtgtccgacttccggaaggacttccagttctacaaggtgcgggagatcaacaactaccaccacgcccacgacgcctacctgaacgccgtggtgggcaccgccctgatcaagaagtaccccaagctggagtccgagttcgtgtacggcgactacaaggtgtacgacgtgcggaagatgatcgccaagtccgagcaggagatcggcaaggccaccgccaagtacttcttctactccaacatcatgaacttcttcaagaccgagatcaccctggccaacggcgagatccggaagcggcccctgatcgagaccaacggcgagaccggcgagatcgtgtgggacaagggccgggacttcgccaccgtgcggaaggtgctgtccatgccccaggtgaacatcgtgaagaagaccgaggtgcagaccggcggcttctccaaggagtccatcctgcccaagcggaactccgacaagctgatcgcccggaagaaggactgggaccccaagaagtacggcggcttcgactcccccaccgtggcctactccgtgctggtggtggccaaggtggagaagggcaagtccaagaagctgaagtccgtgaaggagctgctgggcatcaccatcatggagcggtcctccttcgagaagaaccccatcgacttcctggaggccaagggctacaaggaggtgaagaaggacctgatcatcaagctgcccaagtactccctgttcgagctggagaacggccggaagcggatgctggcctccgccggcgagctgcagaagggcaacgagctggccctgccctccaagtacgtgaacttcctgtacctggcctcccactacgagaagctgaagggctcccccgaggacaacgagcagaagcagctgttcgtggagcagcacaagcactacctggacgagatcatcgagcagatctccgagttctccaagcgggtgatcctggccgacgccaacctggacaaggtgctgtccgcctacaacaagcaccgggacaagcccatccgggagcaggccgagaacatcatccacctgttcaccctgaccaacctgggcgcccccgccgccttcaagtacttcgacaccaccatcgaccggaagcggtacacctccaccaaggaggtgctggacgccaccctgatccaccagtccatcaccggcctgtacgagacccggatcgacctgtcccagctgggcggcgacggcggcggctcccccaagaagaagcggaaggtgtga

SEQ ID NO: 48 - DNA, 4107 bp, synthetic construct
  source 1..4107: mol_type = other DNA
atggacaagaagtactccatcggcctggccatcggcaccaactccgtgggctgggccgtgatcaccgacgagtacaaggtgccctccaagaagttcaaggtgctgggcaacaccgaccggcactccatcaagaagaacctgatcggcgccctgctgttcgactccggcgagaccgccgaggccacccggctgaagcggaccgcccggcggcggtacacccggcggaagaaccggatctgctacctgcaggagatcttctccaacgagatggccaaggtggacgactccttcttccaccggctggaggagtccttcctggtggaggaggacaagaagcacgagcggcaccccatcttcggcaacatcgtggacgaggtggcctaccacgagaagtaccccaccatctaccacctgcggaagaagctggtggactccaccgacaaggccgacctgcggctgatctacctggccctggcccacatgatcaagttccggggccacttcctgatcgagggcgacctgaaccccgacaactccgacgtggacaagctgttcatccagctggtgcagacctacaaccagctgttcgaggagaaccccatcaacgcctccggcgtggacgccaaggccatcctgtccgcccggctgtccaagtcccggcggctggagaacctgatcgcccagctgcccggcgagaagaagaacggcctgttcggcaacctgatcgccctgtccctgggcctgacccccaacttcaagtccaacttcgacctggccgaggacgccaagctgcagctgtccaaggacacctacgacgacgacctggacaacctgctggcccagatcggcgaccagtacgccgacctgttcctggccgccaagaacctgtccgacgccatcctgctgtccgacatcctgcgggtgaacaccgagatcaccaaggcccccctgtccgcctccatgatcaagcggtacgacgagcaccaccaggacctgaccctgctgaaggccctggtgcggcagcagctgcccgagaagtacaaggagatcttcttcgaccagtccaagaacggctacgccggctacatcgacggcggcgcctcccaggaggagttctacaagttcatcaagcccatcctggagaagatggacggcaccgaggagctgctggtgaagctgaaccgggaggacctgctgcggaagcagcggaccttcgacaacggctccatcccccaccagatccacctgggcgagctgcacgccatcctgcggcggcaggaggacttctaccccttcctgaaggacaaccgggagaagatcgagaagatcctgaccttccggatcccctactacgtgggccccctggcccggggcaactcccggttcgcctggatgacccggaagtccgaggagaccatcaccccctggaacttcgaggaggtggtggacaagggcgcctccgcccagtccttcatcgagcggatgaccaacttcgacaagaacctgcccaacgagaaggtgctgcccaagcactccctgctgtacgagtacttcaccgtgtacaacgagctgaccaaggtgaagtacgtgaccgagggcatgcggaagcccgccttcctgtccggcgagcagaagaaggccatcgtggacctgctgttcaagaccaaccggaaggtgaccgtgaagcagctgaaggaggactacttcaagaagatcgagtgcttcgactccgtggagatctccggcgtggaggaccggttcaacgcctccctgggcacctaccacgacctgctgaagatcatcaaggacaaggacttcctggacaacgaggagaacgaggacatcctggaggacatcgtgctgaccctgaccctgttcgaggaccgggagatgatcgaggagcggctgaagacctacgcccacctgttcgacgacaaggtgatgaagcagctgaagcggcggcggtacaccggctggggccggctgtcccggaagctgatcaacggcatccgggacaagcagtccggcaagaccatcctggacttcctgaagtccgacggcttcgccaaccggaacttcatgcagctgatccacgacgactccctgaccttcaaggaggacatccagaaggcccaggtgtccggccagggcgactccctgcacgagcacatcgccaacctggccggctcccccgccatcaagaagggcatcctgcagaccgtgaaggtggtggacgagctggtgaaggtgatgggccggcacaagcccgagaacatcgtgatcgagatggcccgggagaaccagaccacccagaagggccagaagaactcccgggagcggatgaagcggatcgaggagggcatcaaggagctgggctcccagatcctgaaggagcaccccgtggagaacacccagctgcagaacgagaagctgtacctgtactacctgcagaacggccgggacatgtacgtggaccaggagctggacatcaaccggctgtccgactacgacgtggaccacatcgtgccccagtccttcctgaaggacgactccatcgacaacaaggtgctgacccggtccgacaagaaccggggcaagtccgacaacgtgccctccgaggaggtggtgaagaagatgaagaactactggcggcagctgctgaacgccaagctgatcacccagcggaagttcgacaacctgaccaaggccgagcggggcggcctgtccgagctggacaaggccggcttcatcaagcggcagctggtggagacccggcagatcaccaagcacgtggcccagatcctggactcccggatgaacaccaagtacgacgagaacgacaagctgatccgggaggtgaaggtgatcaccctgaagtccaagctggtgtccgacttccggaaggacttccagttctacaaggtgcgggagatcaacaactaccaccacgcccacgacgcctacctgaacgccgtggtgggcaccgccctgatcaagaagtaccccaagctggagtccgagttcgtgtacggcgactacaaggtgtacgacgtgcggaagatgatcgccaagtccgagcaggagatcggcaaggccaccgccaagtacttcttctactccaacatcatgaacttcttcaagaccgagatcaccctggccaacggcgagatccggaagcggcccctgatcgagaccaacggcgagaccggcgagatcgtgtgggacaagggccgggacttcgccaccgtgcggaaggtgctgtccatgccccaggtgaacatcgtgaagaagaccgaggtgcagaccggcggcttctccaaggagtccatcctgcccaagcggaactccgacaagctgatcgcccggaagaaggactgggaccccaagaagtacggcggcttcgactcccccaccgtggcctactccgtgctggtggtggccaaggtggagaagggcaagtccaagaagctgaagtccgtgaaggagctgctgggcatcaccatcatggagcggtcctccttcgagaagaaccccatcgacttcctggaggccaagggctacaaggaggtgaagaaggacctgatcatcaagctgcccaagtactccctgttcgagctggagaacggccggaagcggatgctggcctccgccggcgagctgcagaagggcaacgagctggccctgccctccaagtacgtgaacttcctgtacctggcctcccactacgagaagctgaagggctcccccgaggacaacgagcagaagcagctgttcgtggagcagcacaagcactacctggacgagatcatcgagcagatctccgagttctccaagcgggtgatcctggccgacgccaacctggacaaggtgctgtccgcctacaacaagcaccgggacaagcccatccgggagcaggccgagaacatcatccacctgttcaccctgaccaacctgggcgcccccgccgccttcaagtacttcgacaccaccatcgaccggaagcggtacacctccaccaaggaggtgctggacgccaccctgatccaccagtccatcaccggcctgtacgagacccggatcgacctgtcccagctgggcggcgactga

SEQ ID NO: 49 - DNA, 4179 bp, synthetic construct
  source 1..4179: mol_type = other DNA
atggacaagaagtactccatcggcctggccatcggcaccaactccgtgggctgggccgtgatcaccgacgagtacaaggtgccctccaagaagttcaaggtgctgggcaacaccgaccggcactccatcaagaagaacctgatcggcgccctgctgttcgactccggcgagaccgccgaggccacccggctgaagcggaccgcccggcggcggtacacccggcggaagaaccggatctgctacctgcaggagatcttctccaacgagatggccaaggtggacgactccttcttccaccggctggaggagtccttcctggtggaggaggacaagaagcacgagcggcaccccatcttcggcaacatcgtggacgaggtggcctaccacgagaagtaccccaccatctaccacctgcggaagaagctggtggactccaccgacaaggccgacctgcggctgatctacctggccctggcccacatgatcaagttccggggccacttcctgatcgagggcgacctgaaccccgacaactccgacgtggacaagctgttcatccagctggtgcagacctacaaccagctgttcgaggagaaccccatcaacgcctccggcgtggacgccaaggccatcctgtccgcccggctgtccaagtcccggcggctggagaacctgatcgcccagctgcccggcgagaagaagaacggcctgttcggcaacctgatcgccctgtccctgggcctgacccccaacttcaagtccaacttcgacctggccgaggacgccaagctgcagctgtccaaggacacctacgacgacgacctggacaacctgctggcccagatcggcgaccagtacgccgacctgttcctggccgccaagaacctgtccgacgccatcctgctgtccgacatcctgcgggtgaacaccgagatcaccaaggcccccctgtccgcctccatgatcaagcggtacgacgagcaccaccaggacctgaccctgctgaaggccctggtgcggcagcagctgcccgagaagtacaaggagatcttcttcgaccagtccaagaacggctacgccggctacatcgacggcggcgcctcccaggaggagttctacaagttcatcaagcccatcctggagaagatggacggcaccgaggagctgctggtgaagctgaaccgggaggacctgctgcggaagcagcggaccttcgacaacggctccatcccccaccagatccacctgggcgagctgcacgccatcctgcggcggcaggaggacttctaccccttcctgaaggacaaccgggagaagatcgagaagatcctgaccttccggatcccctactacgtgggccccctggcccggggcaactcccggttcgcctggatgacccggaagtccgaggagaccatcaccccctggaacttcgaggaggtggtggacaagggcgcctccgcccagtccttcatcgagcggatgaccaacttcgacaagaacctgcccaacgagaaggtgctgcccaagcactccctgctgtacgagtacttcaccgtgtacaacgagctgaccaaggtgaagtacgtgaccgagggcatgcggaagcccgccttcctgtccggcgagcagaagaaggccatcgtggacctgctgttcaagaccaaccggaaggtgaccgtgaagcagctgaaggaggactacttcaagaagatcgagtgcttcgactccgtggagatctccggcgtggaggaccggttcaacgcctccctgggcacctaccacgacctgctgaagatcatcaaggacaaggacttcctggacaacgaggagaacgaggacatcctggaggacatcgtgctgaccctgaccctgttcgaggaccgggagatgatcgaggagcggctgaagacctacgcccacctgttcgacgacaaggtgatgaagcagctgaagcggcggcggtacaccggctggggccggctgtcccggaagctgatcaacggcatccgggacaagcagtccggcaagaccatcctggacttcctgaagtccgacggcttcgccaaccggaacttcatgcagctgatccacgacgactccctgaccttcaaggaggacatccagaaggcccaggtgtccggccagggcgactccctgcacgagcacatcgccaacctggccggctcccccgccatcaagaagggcatcctgcagaccgtgaaggtggtggacgagctggtgaaggtgatgggccggcacaagcccgagaacatcgtgatcgagatggcccgggagaaccagaccacccagaagggccagaagaactcccgggagcggatgaagcggatcgaggagggcatcaaggagctgggctcccagatcctgaaggagcaccccgtggagaacacccagctgcagaacgagaagctgtacctgtactacctgcagaacggccgggacatgtacgtggaccaggagctggacatcaaccggctgtccgactacgacgtggaccacatcgtgccccagtccttcctgaaggacgactccatcgacaacaaggtgctgacccggtccgacaagaaccggggcaagtccgacaacgtgccctccgaggaggtggtgaagaagatgaagaactactggcggcagctgctgaacgccaagctgatcacccagcggaagttcgacaacctgaccaaggccgagcggggcggcctgtccgagctggacaaggccggcttcatcaagcggcagctggtggagacccggcagatcaccaagcacgtggcccagatcctggactcccggatgaacaccaagtacgacgagaacgacaagctgatccgggaggtgaaggtgatcaccctgaagtccaagctggtgtccgacttccggaaggacttccagttctacaaggtgcgggagatcaacaactaccaccacgcccacgacgcctacctgaacgccgtggtgggcaccgccctgatcaagaagtaccccaagctggagtccgagttcgtgtacggcgactacaaggtgtacgacgtgcggaagatgatcgccaagtccgagcaggagatcggcaaggccaccgccaagtacttcttctactccaacatcatgaacttcttcaagaccgagatcaccctggccaacggcgagatccggaagcggcccctgatcgagaccaacggcgagaccggcgagatcgtgtgggacaagggccgggacttcgccaccgtgcggaaggtgctgtccatgccccaggtgaacatcgtgaagaagaccgaggtgcagaccggcggcttctccaaggagtccatcctgcccaagcggaactccgacaagctgatcgcccggaagaaggactgggaccccaagaagtacggcggcttcgactcccccaccgtggcctactccgtgctggtggtggccaaggtggagaagggcaagtccaagaagctgaagtccgtgaaggagctgctgggcatcaccatcatggagcggtcctccttcgagaagaaccccatcgacttcctggaggccaagggctacaaggaggtgaagaaggacctgatcatcaagctgcccaagtactccctgttcgagctggagaacggccggaagcggatgctggcctccgccggcgagctgcagaagggcaacgagctggccctgccctccaagtacgtgaacttcctgtacctggcctcccactacgagaagctgaagggctcccccgaggacaacgagcagaagcagctgttcgtggagcagcacaagcactacctggacgagatcatcgagcagatctccgagttctccaagcgggtgatcctggccgacgccaacctggacaaggtgctgtccgcctacaacaagcaccgggacaagcccatccgggagcaggccgagaacatcatccacctgttcaccctgaccaacctgggcgcccccgccgccttcaagtacttcgacaccaccatcgaccggaagcggtacacctccaccaaggaggtgctggacgccaccctgatccaccagtccatcaccggcctgtacgagacccggatcgacctgtcccagctgggcggcgacggctccggctcccccaagaagaagcggaaggtggacggctcccccaagaagaagcggaaggtggactccggctga

SEQ ID NO: 50 - DNA, 4140 bp, synthetic construct
  source 1..4140: mol_type = other DNA
atggacaagaagtacagcatcggcctggccatcggcaccaacagcgtgggctgggccgtgatcaccgacgagtacaaggtgcccagcaagaagttcaaggtgctgggcaacaccgaccggcacagcatcaagaagaacctgatcggcgccctgctgttcgacagcggcgagaccgccgaggccacccggctgaagcggaccgcccggcggcggtacacccggcggaagaaccggatctgctacctgcaggagatcttcagcaacgagatggccaaggtggacgacagcttcttccaccggctggaggagagcttcctggtggaggaggacaagaagcacgagcggcaccccatcttcggcaacatcgtggacgaggtggcctaccacgagaagtaccccaccatctaccacctgcggaagaagctggtggacagcaccgacaaggccgacctgcggctgatctacctggccctggcccacatgatcaagttccggggccacttcctgatcgagggcgacctgaaccccgacaacagcgacgtggacaagctgttcatccagctggtgcagacctacaaccagctgttcgaggagaaccccatcaacgccagcggcgtggacgccaaggccatcctgagcgcccggctgagcaagagccggcggctggagaacctgatcgcccagctgcccggcgagaagaagaacggcctgttcggcaacctgatcgccctgagcctgggcctgacccccaacttcaagagcaacttcgacctggccgaggacgccaagctgcagctgagcaaggacacctacgacgacgacctggacaacctgctggcccagatcggcgaccagtacgccgacctgttcctggccgccaagaacctgagcgacgccatcctgctgagcgacatcctgcgggtgaacaccgagatcaccaaggcccccctgagcgccagcatgatcaagcggtacgacgagcaccaccaggacctgaccctgctgaaggccctggtgcggcagcagctgcccgagaagtacaaggagatcttcttcgaccagagcaagaacggctacgccggctacatcgacggcggcgccagccaggaggagttctacaagttcatcaagcccatcctggagaagatggacggcaccgaggagctgctggtgaagctgaaccgggaggacctgctgcggaagcagcggaccttcgacaacggcagcatcccccaccagatccacctgggcgagctgcacgccatcctgcggcggcaggaggacttctaccccttcctgaaggacaaccgggagaagatcgagaagatcctgaccttccggatcccctactacgtgggccccctggcccggggcaacagccggttcgcctggatgacccggaagagcgaggagaccatcaccccctggaacttcgaggaggtggtggacaagggcgccagcgcccagagcttcatcgagcggatgaccaacttcgacaagaacctgcccaacgagaaggtgctgcccaagcacagcctgctgtacgagtacttcaccgtgtacaacgagctgaccaaggtgaagtacgtgaccgagggcatgcggaagcccgccttcctgagcggcgagcagaagaaggccatcgtggacctgctgttcaagaccaaccggaaggtgaccgtgaagcagctgaaggaggactacttcaagaagatcgagtgcttcgacagcgtggagatcagcggcgtggaggaccggttcaacgccagcctgggcacctaccacgacctgctgaagatcatcaaggacaaggacttcctggacaacgaggagaacgaggacatcctggaggacatcgtgctgaccctgaccctgttcgaggaccgggagatgatcgaggagcggctgaagacctacgcccacctgttcgacgacaaggtgatgaagcagctgaagcggcggcggtacaccggctggggccggctgagccggaagctgatcaacggcatccgggacaagcagagcggcaagaccatcctggacttcctgaagagcgacggcttcgccaaccggaacttcatgcagctgatccacgacgacagcctgaccttcaaggaggacatccagaaggcccaggtgagcggccagggcgacagcctgcacgagcacatcgccaacctggccggcagccccgccatcaagaagggcatcctgcagaccgtgaaggtggtggacgagctggtgaaggtgatgggccggcacaagcccgagaacatcgtgatcgagatggcccgggagaaccagaccacccagaagggccagaagaacagccgggagcggatgaagcggatcgaggagggcatcaaggagctgggcagccagatcctgaaggagcaccccgtggagaacacccagctgcagaacgagaagctgtacctgtactacctgcagaacggccgggacatgtacgtggaccaggagctggacatcaaccggctgagcgactacgacgtggaccacatcgtgccccagagcttcctgaaggacgacagcatcgacaacaaggtgctgacccggagcgacaagaaccggggcaagagcgacaacgtgcccagcgaggaggtggtgaagaagatgaagaactactggcggcagctgctgaacgccaagctgatcacccagcggaagttcgacaacctgaccaaggccgagcggggcggcctgagcgagctggacaaggccggcttcatcaagcggcagctggtggagacccggcagatcaccaagcacgtggcccagatcctggacagccggatgaacaccaagtacgacgagaacgacaagctgatccgggaggtgaaggtgatcaccctgaagagcaagctggtgagcgacttccggaaggacttccagttctacaaggtgcgggagatcaacaactaccaccacgcccacgacgcctacctgaacgccgtggtgggcaccgccctgatcaagaagtaccccaagctggagagcgagttcgtgtacggcgactacaaggtgtacgacgtgcggaagatgatcgccaagagcgagcaggagatcggcaaggccaccgccaagtacttcttctacagcaacatcatgaacttcttcaagaccgagatcaccctggccaacggcgagatccggaagcggcccctgatcgagaccaacggcgagaccggcgagatcgtgtgggacaagggccgggacttcgccaccgtgcggaaggtgctgagcatgccccaggtgaacatcgtgaagaagaccgaggtgcagaccggcggcttcagcaaggagagcatcctgcccaagcggaacagcgacaagctgatcgcccggaagaaggactgggaccccaagaagtacggcggcttcgacagccccaccgtggcctacagcgtgctggtggtggccaaggtggagaagggcaagagcaagaagctgaagagcgtgaaggagctgctgggcatcaccatcatggagcggagcagcttcgagaagaaccccatcgacttcctggaggccaagggctacaaggaggtgaagaaggacctgatcatcaagctgcccaagtacagcctgttcgagctggagaacggccggaagcggatgctggccagcgccggcgagctgcagaagggcaacgagctggccctgcccagcaagtacgtgaacttcctgtacctggccagccactacgagaagctgaagggcagccccgaggacaacgagcagaagcagctgttcgtggagcagcacaagcactacctggacgagatcatcgagcagatcagcgagttcagcaagcgggtgatcctggccgacgccaacctggacaaggtgctgagcgcctacaacaagcaccgggacaagcccatccgggagcaggccgagaacatcatccacctgttcaccctgaccaacctgggcgcccccgccgccttcaagtacttcgacaccaccatcgaccggaagcggtacaccagcaccaaggaggtgctggacgccaccctgatccaccagagcatcaccggcctgtacgagacccggatcgacctgagccagctgggcggcgacggcggcggcagccccaagaagaagcggaaggtgtga

SEQ ID NO: 51 - DNA, 4179 bp, synthetic construct
  source 1..4179: mol_type = other DNA
atggacaagaagtacagcatcggcctggccatcggcaccaacagcgtgggctgggccgtgatcaccgacgagtacaaggtgcccagcaagaagttcaaggtgctgggcaacaccgaccggcacagcatcaagaagaacctgatcggcgccctgctgttcgacagcggcgagaccgccgaggccacccggctgaagcggaccgcccggcggcggtacacccggcggaagaaccggatctgctacctgcaggagatcttcagcaacgagatggccaaggtggacgacagcttcttccaccggctggaggagagcttcctggtggaggaggacaagaagcacgagcggcaccccatcttcggcaacatcgtggacgaggtggcctaccacgagaagtaccccaccatctaccacctgcggaagaagctggtggacagcaccgacaaggccgacctgcggctgatctacctggccctggcccacatgatcaagttccggggccacttcctgatcgagggcgacctgaaccccgacaacagcgacgtggacaagctgttcatccagctggtgcagacctacaaccagctgttcgaggagaaccccatcaacgccagcggcgtggacgccaaggccatcctgagcgcccggctgagcaagagccggcggctggagaacctgatcgcccagctgcccggcgagaagaagaacggcctgttcggcaacctgatcgccctgagcctgggcctgacccccaacttcaagagcaacttcgacctggccgaggacgccaagctgcagctgagcaaggacacctacgacgacgacctggacaacctgctggcccagatcggcgaccagtacgccgacctgttcctggccgccaagaacctgagcgacgccatcctgctgagcgacatcctgcgggtgaacaccgagatcaccaaggcccccctgagcgccagcatgatcaagcggtacgacgagcaccaccaggacctgaccctgctgaaggccctggtgcggcagcagctgcccgagaagtacaaggagatcttcttcgaccagagcaagaacggctacgccggctacatcgacggcggcgccagccaggaggagttctacaagttcatcaagcccatcctggagaagatggacggcaccgaggagctgctggtgaagctgaaccgggaggacctgctgcggaagcagcggaccttcgacaacggcagcatcccccaccagatccacctgggcgagctgcacgccatcctgcggcggcaggaggacttctaccccttcctgaaggacaaccgggagaagatcgagaagatcctgaccttccggatcccctactacgtgggccccctggcccggggcaacagccggttcgcctggatgacccggaagagcgaggagaccatcaccccctggaacttcgaggaggtggtggacaagggcgccagcgcccagagcttcatcgagcggatgaccaacttcgacaagaacctgcccaacgagaaggtgctgcccaagcacagcctgctgtacgagtacttcaccgtgtacaacgagctgaccaaggtgaagtacgtgaccgagggcatgcggaagcccgccttcctgagcggcgagcagaagaaggccatcgtggacctgctgttcaagaccaaccggaaggtgaccgtgaagcagctgaaggaggactacttcaagaagatcgagtgcttcgacagcgtggagatcagcggcgtggaggaccggttcaacgccagcctgggcacctaccacgacctgctgaagatcatcaaggacaaggacttcctggacaacgaggagaacgaggacatcctggaggacatcgtgctgaccctgaccctgttcgaggaccgggagatgatcgaggagcggctgaagacctacgcccacctgttcgacgacaaggtgatgaagcagctgaagcggcggcggtacaccggctggggccggctgagccggaagctgatcaacggcatccgggacaagcagagcggcaagaccatcctggacttcctgaagagcgacggcttcgccaaccggaacttcatgcagctgatccacgacgacagcctgaccttcaaggaggacatccagaaggcccaggtgagcggccagggcgacagcctgcacgagcacatcgccaacctggccggcagccccgccatcaagaagggcatcctgcagaccgtgaaggtggtggacgagctggtgaaggtgatgggccggcacaagcccgagaacatcgtgatcgagatggcccgggagaaccagaccacccagaagggccagaagaacagccgggagcggatgaagcggatcgaggagggcatcaaggagctgggcagccagatcctgaaggagcaccccgtggagaacacccagctgcagaacgagaagctgtacctgtactacctgcagaacggccgggacatgtacgtggaccaggagctggacatcaaccggctgagcgactacgacgtggaccacatcgtgccccagagcttcctgaaggacgacagcatcgacaacaaggtgctgacccggagcgacaagaaccggggcaagagcgacaacgtgcccagcgaggaggtggtgaagaagatgaagaactactggcggcagctgctgaacgccaagctgatcacccagcggaagttcgacaacctgaccaaggccgagcggggcggcctgagcgagctggacaaggccggcttcatcaagcggcagctggtggagacccggcagatcaccaagcacgtggcccagatcctggacagccggatgaacaccaagtacgacgagaacgacaagctgatccgggaggtgaaggtgatcaccctgaagagcaagctggtgagcgacttccggaaggacttccagttctacaaggtgcgggagatcaacaactaccaccacgcccacgacgcctacctgaacgccgtggtgggcaccgccctgatcaagaagtaccccaagctggagagcgagttcgtgtacggcgactacaaggtgtacgacgtgcggaagatgatcgccaagagcgagcaggagatcggcaaggccaccgccaagtacttcttctacagcaacatcatgaacttcttcaagaccgagatcaccctggccaacggcgagatccggaagcggcccctgatcgagaccaacggcgagaccggcgagatcgtgtgggacaagggccgggacttcgccaccgtgcggaaggtgctgagcatgccccaggtgaacatcgtgaagaagaccgaggtgcagaccggcggcttcagcaaggagagcatcctgcccaagcggaacagcgacaagctgatcgcccggaagaaggactgggaccccaagaagtacggcggcttcgacagccccaccgtggcctacagcgtgctggtggtggccaaggtggagaagggcaagagcaagaagctgaagagcgtgaaggagctgctgggcatcaccatcatggagcggagcagcttcgagaagaaccccatcgacttcctggaggccaagggctacaaggaggtgaagaaggacctgatcatcaagctgcccaagtacagcctgttcgagctggagaacggccggaagcggatgctggccagcgccggcgagctgcagaagggcaacgagctggccctgcccagcaagtacgtgaacttcctgtacctggccagccactacgagaagctgaagggcagccccgaggacaacgagcagaagcagctgttcgtggagcagcacaagcactacctggacgagatcatcgagcagatcagcgagttcagcaagcgggtgatcctggccgacgccaacctggacaaggtgctgagcgcctacaacaagcaccgggacaagcccatccgggagcaggccgagaacatcatccacctgttcaccctgaccaacctgggcgcccccgccgccttcaagtacttcgacaccaccatcgaccggaagcggtacaccagcaccaaggaggtgctggacgccaccctgatccaccagagcatcaccggcctgtacgagacccggatcgacctgagccagctgggcggcgacggcagcggcagccccaagaagaagcggaaggtggacggcagccccaagaagaagcggaaggtggacagcggctga

SEQ ID NO: 52 - DNA, 4107 bp, synthetic construct
  source 1..4107: mol_type = other DNA
atggacaagaagtacagcatcggcctggccatcggcaccaacagcgtgggctgggccgtgatcaccgacgagtacaaggtgcccagcaagaagttcaaggtgctgggcaacaccgaccggcacagcatcaagaagaacctgatcggcgccctgctgttcgacagcggcgagaccgccgaggccacccggctgaagcggaccgcccggcggcggtacacccggcggaagaaccggatctgctacctgcaggagatcttcagcaacgagatggccaaggtggacgacagcttcttccaccggctggaggagagcttcctggtggaggaggacaagaagcacgagcggcaccccatcttcggcaacatcgtggacgaggtggcctaccacgagaagtaccccaccatctaccacctgcggaagaagctggtggacagcaccgacaaggccgacctgcggctgatctacctggccctggcccacatgatcaagttccggggccacttcctgatcgagggcgacctgaaccccgacaacagcgacgtggacaagctgttcatccagctggtgcagacctacaaccagctgttcgaggagaaccccatcaacgccagcggcgtggacgccaaggccatcctgagcgcccggctgagcaagagccggcggctggagaacctgatcgcccagctgcccggcgagaagaagaacggcctgttcggcaacctgatcgccctgagcctgggcctgacccccaacttcaagagcaacttcgacctggccgaggacgccaagctgcagctgagcaaggacacctacgacgacgacctggacaacctgctggcccagatcggcgaccagtacgccgacctgttcctggccgccaagaacctgagcgacgccatcctgctgagcgacatcctgcgggtgaacaccgagatcaccaaggcccccctgagcgccagcatgatcaagcggtacgacgagcaccaccaggacctgaccctgctgaaggccctggtgcggcagcagctgcccgagaagtacaaggagatcttcttcgaccagagcaagaacggctacgccggctacatcgacggcggcgccagccaggaggagttctacaagttcatcaagcccatcctggagaagatggacggcaccgaggagctgctggtgaagctgaaccgggaggacctgctgcggaagcagcggaccttcgacaacggcagcatcccccaccagatccacctgggcgagctgcacgccatcctgcggcggcaggaggacttctaccccttcctgaaggacaaccgggagaagatcgagaagatcctgaccttccggatcccctactacgtgggccccctggcccggggcaacagccggttcgcctggatgacccggaagagcgaggagaccatcaccccctggaacttcgaggaggtggtggacaagggcgccagcgcccagagcttcatcgagcggatgaccaacttcgacaagaacctgcccaacgagaaggtgctgcccaagcacagcctgctgtacgagtacttcaccgtgtacaacgagctgaccaaggtgaagtacgtgaccgagggcatgcggaagcccgccttcctgagcggcgagcagaagaaggccatcgtggacctgctgttcaagaccaaccggaaggtgaccgtgaagcagctgaaggaggactacttcaagaagatcgagtgcttcgacagcgtggagatcagcggcgtggaggaccggttcaacgccagcctgggcacctaccacgacctgctgaagatcatcaaggacaaggacttcctggacaacgaggagaacgaggacatcctggaggacatcgtgctgaccctgaccctgttcgaggaccgggagatgatcgaggagcggctgaagacctacgcccacctgttcgacgacaaggtgatgaagcagctgaagcggcggcggtacaccggctggggccggctgagccggaagctgatcaacggcatccgggacaagcagagcggcaagaccatcctggacttcctgaagagcgacggcttcgccaaccggaacttcatgcagctgatccacgacgacagcctgaccttcaaggaggacatccagaaggcccaggtgagcggccagggcgacagcctgcacgagcacatcgccaacctggccggcagccccgccatcaagaagggcatcctgcagaccgtgaaggtggtggacgagctggtgaaggtgatgggccggcacaagcccgagaacatcgtgatcgagatggcccgggagaaccagaccacccagaagggccagaagaacagccgggagcggatgaagcggatcgaggagggcatcaaggagctgggcagccagatcctgaaggagcaccccgtggagaacacccagctgcagaacgagaagctgtacctgtactacctgcagaacggccgggacatgtacgtggaccaggagctggacatcaaccggctgagcgactacgacgtggaccacatcgtgccccagagcttcctgaaggacgacagcatcgacaacaaggtgctgacccggagcgacaagaaccggggcaagagcgacaacgtgcccagcgaggaggtggtgaagaagatgaagaactactggcggcagctgctgaacgccaagctgatcacccagcggaagttcgacaacctgaccaaggccgagcggggcggcctgagcgagctggacaaggccggcttcatcaagcggcagctggtggagacccggcagatcaccaagcacgtggcccagatcctggacagccggatgaacaccaagtacgacgagaacgacaagctgatccgggaggtgaaggtgatcaccctgaagagcaagctggtgagcgacttccggaaggacttccagttctacaaggtgcgggagatcaacaactaccaccacgcccacgacgcctacctgaacgccgtggtgggcaccgccctgatcaagaagtaccccaagctggagagcgagttcgtgtacggcgactacaaggtgtacgacgtgcggaagatgatcgccaagagcgagcaggagatcggcaaggccaccgccaagtacttcttctacagcaacatcatgaacttcttcaagaccgagatcaccctggccaacggcgagatccggaagcggcccctgatcgagaccaacggcgagaccggcgagatcgtgtgggacaagggccgggacttcgccaccgtgcggaaggtgctgagcatgccccaggtgaacatcgtgaagaagaccgaggtgcagaccggcggcttcagcaaggagagcatcctgcccaagcggaacagcgacaagctgatcgcccggaagaaggactgggaccccaagaagtacggcggcttcgacagccccaccgtggcctacagcgtgctggtggtggccaaggtggagaagggcaagagcaagaagctgaagagcgtgaaggagctgctgggcatcaccatcatggagcggagcagcttcgagaagaaccccatcgacttcctggaggccaagggctacaaggaggtgaagaaggacctgatcatcaagctgcccaagtacagcctgttcgagctggagaacggccggaagcggatgctggccagcgccggcgagctgcagaagggcaacgagctggccctgcccagcaagtacgtgaacttcctgtacctggccagccactacgagaagctgaagggcagccccgaggacaacgagcagaagcagctgttcgtggagcagcacaagcactacctggacgagatcatcgagcagatcagcgagttcagcaagcgggtgatcctggccgacgccaacctggacaaggtgctgagcgcctacaacaagcaccgggacaagcccatccgggagcaggccgagaacatcatccacctgttcaccctgaccaacctgggcgcccccgccgccttcaagtacttcgacaccaccatcgaccggaagcggtacaccagcaccaaggaggtgctggacgccaccctgatccaccagagcatcaccggcctgtacgagacccggatcgacctgagccagctgggcggcgactga

SEQ ID NO: 53 - DNA, 4134 bp, synthetic construct
  source 1..4134: mol_type = other DNA
gacaagaagtactccatcggcctggccatcggcaccaactccgtgggctgggccgtgatcaccgacgagtacaaggtgccctccaagaagttcaaggtgctgggcaacaccgaccggcactccatcaagaagaacctgatcggcgccctgctgttcgactccggcgagaccgccgaggccacccggctgaagcggaccgcccggcggcggtacacccggcggaagaaccggatctgctacctgcaggagatcttctccaacgagatggccaaggtggacgactccttcttccaccggctggaggagtccttcctggtggaggaggacaagaagcacgagcggcaccccatcttcggcaacatcgtggacgaggtggcctaccacgagaagtaccccaccatctaccacctgcggaagaagctggtggactccaccgacaaggccgacctgcggctgatctacctggccctggcccacatgatcaagttccggggccacttcctgatcgagggcgacctgaaccccgacaactccgacgtggacaagctgttcatccagctggtgcagacctacaaccagctgttcgaggagaaccccatcaacgcctccggcgtggacgccaaggccatcctgtccgcccggctgtccaagtcccggcggctggagaacctgatcgcccagctgcccggcgagaagaagaacggcctgttcggcaacctgatcgccctgtccctgggcctgacccccaacttcaagtccaacttcgacctggccgaggacgccaagctgcagctgtccaaggacacctacgacgacgacctggacaacctgctggcccagatcggcgaccagtacgccgacctgttcctggccgccaagaacctgtccgacgccatcctgctgtccgacatcctgcgggtgaacaccgagatcaccaaggcccccctgtccgcctccatgatcaagcggtacgacgagcaccaccaggacctgaccctgctgaaggccctggtgcggcagcagctgcccgagaagtacaaggagatcttcttcgaccagtccaagaacggctacgccggctacatcgacggcggcgcctcccaggaggagttctacaagttcatcaagcccatcctggagaagatggacggcaccgaggagctgctggtgaagctgaaccgggaggacctgctgcggaagcagcggaccttcgacaacggctccatcccccaccagatccacctgggcgagctgcacgccatcctgcggcggcaggaggacttctaccccttcctgaaggacaaccgggagaagatcgagaagatcctgaccttccggatcccctactacgtgggccccctggcccggggcaactcccggttcgcctggatgacccggaagtccgaggagaccatcaccccctggaacttcgaggaggtggtggacaagggcgcctccgcccagtccttcatcgagcggatgaccaacttcgacaagaacctgcccaacgagaaggtgctgcccaagcactccctgctgtacgagtacttcaccgtgtacaacgagctgaccaaggtgaagtacgtgaccgagggcatgcggaagcccgccttcctgtccggcgagcagaagaaggccatcgtggacctgctgttcaagaccaaccggaaggtgaccgtgaagcagctgaaggaggactacttcaagaagatcgagtgcttcgactccgtggagatctccggcgtggaggaccggttcaacgcctccctgggcacctaccacgacctgctgaagatcatcaaggacaaggacttcctggacaacgaggagaacgaggacatcctggaggacatcgtgctgaccctgaccctgttcgaggaccgggagatgatcgaggagcggctgaagacctacgcccacctgttcgacgacaaggtgatgaagcagctgaagcggcggcggtacaccggctggggccggctgtcccggaagctgatcaacggcatccgggacaagcagtccggcaagaccatcctggacttcctgaagtccgacggcttcgccaaccggaacttcatgcagctgatccacgacgactccctgaccttcaaggaggacatccagaaggcccaggtgtccggccagggcgactccctgcacgagcacatcgccaacctggccggctcccccgccatcaagaagggcatcctgcagaccgtgaaggtggtggacgagctggtgaaggtgatgggccggcacaagcccgagaacatcgtgatcgagatggcccgggagaaccagaccacccagaagggccagaagaactcccgggagcggatgaagcggatcgaggagggcatcaaggagctgggctcccagatcctgaaggagcaccccgtggagaacacccagctgcagaacgagaagctgtacctgtactacctgcagaacggccgggacatgtacgtggaccaggagctggacatcaaccggctgtccgactacgacgtggaccacatcgtgccccagtccttcctgaaggacgactccatcgacaacaaggtgctgacccggtccgacaagaaccggggcaagtccgacaacgtgccctccgaggaggtggtgaagaagatgaagaactactggcggcagctgctgaacgccaagctgatcacccagcggaagttcgacaacctgaccaaggccgagcggggcggcctgtccgagctggacaaggccggcttcatcaagcggcagctggtggagacccggcagatcaccaagcacgtggcccagatcctggactcccggatgaacaccaagtacgacgagaacgacaagctgatccgggaggtgaaggtgatcaccctgaagtccaagctggtgtccgacttccggaaggacttccagttctacaaggtgcgggagatcaacaactaccaccacgcccacgacgcctacctgaacgccgtggtgggcaccgccctgatcaagaagtaccccaagctggagtccgagttcgtgtacggcgactacaaggtgtacgacgtgcggaagatgatcgccaagtccgagcaggagatcggcaaggccaccgccaagtacttcttctactccaacatcatgaacttcttcaagaccgagatcaccctggccaacggcgagatccggaagcggcccctgatcgagaccaacggcgagaccggcgagatcgtgtgggacaagggccgggacttcgccaccgtgcggaaggtgctgtccatgccccaggtgaacatcgtgaagaagaccgaggtgcagaccggcggcttctccaaggagtccatcctgcccaagcggaactccgacaagctgatcgcccggaagaaggactgggaccccaagaagtacggcggcttcgactcccccaccgtggcctactccgtgctggtggtggccaaggtggagaagggcaagtccaagaagctgaagtccgtgaaggagctgctgggcatcaccatcatggagcggtcctccttcgagaagaaccccatcgacttcctggaggccaagggctacaaggaggtgaagaaggacctgatcatcaagctgcccaagtactccctgttcgagctggagaacggccggaagcggatgctggcctccgccggcgagctgcagaagggcaacgagctggccctgccctccaagtacgtgaacttcctgtacctggcctcccactacgagaagctgaagggctcccccgaggacaacgagcagaagcagctgttcgtggagcagcacaagcactacctggacgagatcatcgagcagatctccgagttctccaagcgggtgatcctggccgacgccaacctggacaaggtgctgtccgcctacaacaagcaccgggacaagcccatccgggagcaggccgagaacatcatccacctgttcaccctgaccaacctgggcgcccccgccgccttcaagtacttcgacaccaccatcgaccggaagcggtacacctccaccaaggaggtgctggacgccaccctgatccaccagtccatcaccggcctgtacgagacccggatcgacctgtcccagctgggcggcgacggcggcggctcccccaagaagaagcggaaggtg

SEQ ID NO: 54 - DNA, 4101 bp, synthetic construct
  source 1..4101: mol_type = other DNA
gacaagaagtactccatcggcctggccatcggcaccaactccgtgggctgggccgtgatcaccgacgagtacaaggtgccctccaagaagttcaaggtgctgggcaacaccgaccggcactccatcaagaagaacctgatcggcgccctgctgttcgactccggcgagaccgccgaggccacccggctgaagcggaccgcccggcggcggtacacccggcggaagaaccggatctgctacctgcaggagatcttctccaacgagatggccaaggtggacgactccttcttccaccggctggaggagtccttcctggtggaggaggacaagaagcacgagcggcaccccatcttcggcaacatcgtggacgaggtggcctaccacgagaagtaccccaccatctaccacctgcggaagaagctggtggactccaccgacaaggccgacctgcggctgatctacctggccctggcccacatgatcaagttccggggccacttcctgatcgagggcgacctgaaccccgacaactccgacgtggacaagctgttcatccagctggtgcagacctacaaccagctgttcgaggagaaccccatcaacgcctccggcgtggacgccaaggccatcctgtccgcccggctgtccaagtcccggcggctggagaacctgatcgcccagctgcccggcgagaagaagaacggcctgttcggcaacctgatcgccctgtccctgggcctgacccccaacttcaagtccaacttcgacctggccgaggacgccaagctgcagctgtccaaggacacctacgacgacgacctggacaacctgctggcccagatcggcgaccagtacgccgacctgttcctggccgccaagaacctgtccgacgccatcctgctgtccgacatcctgcgggtgaacaccgagatcaccaaggcccccctgtccgcctccatgatcaagcggtacgacgagcaccaccaggacctgaccctgctgaaggccctggtgcggcagcagctgcccgagaagtacaaggagatcttcttcgaccagtccaagaacggctacgccggctacatcgacggcggcgcctcccaggaggagttctacaagttcatcaagcccatcctggagaagatggacggcaccgaggagctgctggtgaagctgaaccgggaggacctgctgcggaagcagcggaccttcgacaacggctccatcccccaccagatccacctgggcgagctgcacgccatcctgcggcggcaggaggacttctaccccttcctgaaggacaaccgggagaagatcgagaagatcctgaccttccggatcccctactacgtgggccccctggcccggggcaactcccggttcgcctggatgacccggaagtccgaggagaccatcaccccctggaacttcgaggaggtggtggacaagggcgcctccgcccagtccttcatcgagcggatgaccaacttcgacaagaacctgcccaacgagaaggtgctgcccaagcactccctgctgtacgagtacttcaccgtgtacaacgagctgaccaaggtgaagtacgtgaccgagggcatgcggaagcccgccttcctgtccggcgagcagaagaaggccatcgtggacctgctgttcaagaccaaccggaaggtgaccgtgaagcagctgaaggaggactacttcaagaagatcgagtgcttcgactccgtggagatctccggcgtggaggaccggttcaacgcctccctgggcacctaccacgacctgctgaagatcatcaaggacaaggacttcctggacaacgaggagaacgaggacatcctggaggacatcgtgctgaccctgaccctgttcgaggaccgggagatgatcgaggagcggctgaagacctacgcccacctgttcgacgacaaggtgatgaagcagctgaagcggcggcggtacaccggctggggccggctgtcccggaagctgatcaacggcatccgggacaagcagtccggcaagaccatcctggacttcctgaagtccgacggcttcgccaaccggaacttcatgcagctgatccacgacgactccctgaccttcaaggaggacatccagaaggcccaggtgtccggccagggcgactccctgcacgagcacatcgccaacctggccggctcccccgccatcaagaagggcatcctgcagaccgtgaaggtggtggacgagctggtgaaggtgatgggccggcacaagcccgagaacatcgtgatcgagatggcccgggagaaccagaccacccagaagggccagaagaactcccgggagcggatgaagcggatcgaggagggcatcaaggagctgggctcccagatcctgaaggagcaccccgtggagaacacccagctgcagaacgagaagctgtacctgtactacctgcagaacggccgggacatgtacgtggaccaggagctggacatcaaccggctgtccgactacgacgtggaccacatcgtgccccagtccttcctgaaggacgactccatcgacaacaaggtgctgacccggtccgacaagaaccggggcaagtccgacaacgtgccctccgaggaggtggtgaagaagatgaagaactactggcggcagctgctgaacgccaagctgatcacccagcggaagttcgacaacctgaccaaggccgagcggggcggcctgtccgagctggacaaggccggcttcatcaagcggcagctggtggagacccggcagatcaccaagcacgtggcccagatcctggactcccggatgaacaccaagtacgacgagaacgacaagctgatccgggaggtgaaggtgatcaccctgaagtccaagctggtgtccgacttccggaaggacttccagttctacaaggtgcgggagatcaacaactaccaccacgcccacgacgcctacctgaacgccgtggtgggcaccgccctgatcaagaagtaccccaagctggagtccgagttcgtgtacggcgactacaaggtgtacgacgtgcggaagatgatcgccaagtccgagcaggagatcggcaaggccaccgccaagtacttcttctactccaacatcatgaacttcttcaagaccgagatcaccctggccaacggcgagatccggaagcggcccctgatcgagaccaacggcgagaccggcgagatcgtgtgggacaagggccgggacttcgccaccgtgcggaaggtgctgtccatgccccaggtgaacatcgtgaagaagaccgaggtgcagaccggcggcttctccaaggagtccatcctgcccaagcggaactccgacaagctgatcgcccggaagaaggactgggaccccaagaagtacggcggcttcgactcccccaccgtggcctactccgtgctggtggtggccaaggtggagaagggcaagtccaagaagctgaagtccgtgaaggagctgctgggcatcaccatcatggagcggtcctccttcgagaagaaccccatcgacttcctggaggccaagggctacaaggaggtgaagaaggacctgatcatcaagctgcccaagtactccctgttcgagctggagaacggccggaagcggatgctggcctccgccggcgagctgcagaagggcaacgagctggccctgccctccaagtacgtgaacttcctgtacctggcctcccactacgagaagctgaagggctcccccgaggacaacgagcagaagcagctgttcgtggagcagcacaagcactacctggacgagatcatcgagcagatctccgagttctccaagcgggtgatcctggccgacgccaacctggacaaggtgctgtccgcctacaacaagcaccgggacaagcccatccgggagcaggccgagaacatcatccacctgttcaccctgaccaacctgggcgcccccgccgccttcaagtacttcgacaccaccatcgaccggaagcggtacacctccaccaaggaggtgctggacgccaccctgatccaccagtccatcaccggcctgtacgagacccggatcgacctgtcccagctgggcggcgac

SEQ ID NO: 55 - DNA, 4173 bp, synthetic construct
  source 1..4173: mol_type = other DNA
gacaagaagtactccatcggcctggccatcggcaccaactccgtgggctgggccgtgatcaccgacgagtacaaggtgccctccaagaagttcaaggtgctgggcaacaccgaccggcactccatcaagaagaacctgatcggcgccctgctgttcgactccggcgagaccgccgaggccacccggctgaagcggaccgcccggcggcggtacacccggcggaagaaccggatctgctacctgcaggagatcttctccaacgagatggccaaggtggacgactccttcttccaccggctggaggagtccttcctggtggaggaggacaagaagcacgagcggcaccccatcttcggcaacatcgtggacgaggtggcctaccacgagaagtaccccaccatctaccacctgcggaagaagctggtggactccaccgacaaggccgacctgcggctgatctacctggccctggcccacatgatcaagttccggggccacttcctgatcgagggcgacctgaaccccgacaactccgacgtggacaagctgttcatccagctggtgcagacctacaaccagctgttcgaggagaaccccatcaacgcctccggcgtggacgccaaggccatcctgtccgcccggctgtccaagtcccggcggctggagaacctgatcgcccagctgcccggcgagaagaagaacggcctgttcggcaacctgatcgccctgtccctgggcctgacccccaacttcaagtccaacttcgacctggccgaggacgccaagctgcagctgtccaaggacacctacgacgacgacctggacaacctgctggcccagatcggcgaccagtacgccgacctgttcctggccgccaagaacctgtccgacgccatcctgctgtccgacatcctgcgggtgaacaccgagatcaccaaggcccccctgtccgcctccatgatcaagcggtacgacgagcaccaccaggacctgaccctgctgaaggccctggtgcggcagcagctgcccgagaagtacaaggagatcttcttcgaccagtccaagaacggctacgccggctacatcgacggcggcgcctcccaggaggagttctacaagttcatcaagcccatcctggagaagatggacggcaccgaggagctgctggtgaagctgaaccgggaggacctgctgcggaagcagcggaccttcgacaacggctccatcccccaccagatccacctgggcgagctgcacgccatcctgcggcggcaggaggacttctaccccttcctgaaggacaaccgggagaagatcgagaagatcctgaccttccggatcccctactacgtgggccccctggcccggggcaactcccggttcgcctggatgacccggaagtccgaggagaccatcaccccctggaacttcgaggaggtggtggacaagggcgcctccgcccagtccttcatcgagcggatgaccaacttcgacaagaacctgcccaacgagaaggtgctgcccaagcactccctgctgtacgagtacttcaccgtgtacaacgagctgaccaaggtgaagtacgtgaccgagggcatgcggaagcccgccttcctgtccggcgagcagaagaaggccatcgtggacctgctgttcaagaccaaccggaaggtgaccgtgaagcagctgaaggaggactacttcaagaagatcgagtgcttcgactccgtggagatctccggcgtggaggaccggttcaacgcctccctgggcacctaccacgacctgctgaagatcatcaaggacaaggacttcctggacaacgaggagaacgaggacatcctggaggacatcgtgctgaccctgaccctgttcgaggaccgggagatgatcgaggagcggctgaagacctacgcccacctgttcgacgacaaggtgatgaagcagctgaagcggcggcggtacaccggctggggccggctgtcccggaagctgatcaacggcatccgggacaagcagtccggcaagaccatcctggacttcctgaagtccgacggcttcgccaaccggaacttcatgcagctgatccacgacgactccctgaccttcaaggaggacatccagaaggcccaggtgtccggccagggcgactccctgcacgagcacatcgccaacctggccggctcccccgccatcaagaagggcatcctgcagaccgtgaaggtggtggacgagctggtgaaggtgatgggccggcacaagcccgagaacatcgtgatcgagatggcccgggagaaccagaccacccagaagggccagaagaactcccgggagcggatgaagcggatcgaggagggcatcaaggagctgggctcccagatcctgaaggagcaccccgtggagaacacccagctgcagaacgagaagctgtacctgtactacctgcagaacggccgggacatgtacgtggaccaggagctggacatcaaccggctgtccgactacgacgtggaccacatcgtgccccagtccttcctgaaggacgactccatcgacaacaaggtgctgacccggtccgacaagaaccggggcaagtccgacaacgtgccctccgaggaggtggtgaagaagatgaagaactactggcggcagctgctgaacgccaagctgatcacccagcggaagttcgacaacctgaccaaggccgagcggggcggcctgtccgagctggacaaggccggcttcatcaagcggcagctggtggagacccggcagatcaccaagcacgtggcccagatcctggactcccggatgaacaccaagtacgacgagaacgacaagctgatccgggaggtgaaggtgatcaccctgaagtccaagctggtgtccgacttccggaaggacttccagttctacaaggtgcgggagatcaacaactaccaccacgcccacgacgcctacctgaacgccgtggtgggcaccgccctgatcaagaagtaccccaagctggagtccgagttcgtgtacggcgactacaaggtgtacgacgtgcggaagatgatcgccaagtccgagcaggagatcggcaaggccaccgccaagtacttcttctactccaacatcatgaacttcttcaagaccgagatcaccctggccaacggcgagatccggaagcggcccctgatcgagaccaacggcgagaccggcgagatcgtgtgggacaagggccgggacttcgccaccgtgcggaaggtgctgtccatgccccaggtgaacatcgtgaagaagaccgaggtgcagaccggcggcttctccaaggagtccatcctgcccaagcggaactccgacaagctgatcgcccggaagaaggactgggaccccaagaagtacggcggcttcgactcccccaccgtggcctactccgtgctggtggtggccaaggtggagaagggcaagtccaagaagctgaagtccgtgaaggagctgctgggcatcaccatcatggagcggtcctccttcgagaagaaccccatcgacttcctggaggccaagggctacaaggaggtgaagaaggacctgatcatcaagctgcccaagtactccctgttcgagctggagaacggccggaagcggatgctggcctccgccggcgagctgcagaagggcaacgagctggccctgccctccaagtacgtgaacttcctgtacctggcctcccactacgagaagctgaagggctcccccgaggacaacgagcagaagcagctgttcgtggagcagcacaagcactacctggacgagatcatcgagcagatctccgagttctccaagcgggtgatcctggccgacgccaacctggacaaggtgctgtccgcctacaacaagcaccgggacaagcccatccgggagcaggccgagaacatcatccacctgttcaccctgaccaacctgggcgcccccgccgccttcaagtacttcgacaccaccatcgaccggaagcggtacacctccaccaaggaggtgctggacgccaccctgatccaccagtccatcaccggcctgtacgagacccggatcgacctgtcccagctgggcggcgacggctccggctcccccaagaagaagcggaaggtggacggctcccccaagaagaagcggaaggtggactccggc

SEQ ID NO: 56 - DNA, 4134 bp, synthetic construct
  source 1..4134: mol_type = other DNA
gacaagaagtacagcatcggcctggccatcggcaccaacagcgtgggctgggccgtgatcaccgacgagtacaaggtgcccagcaagaagttcaaggtgctgggcaacaccgaccggcacagcatcaagaagaacctgatcggcgccctgctgttcgacagcggcgagaccgccgaggccacccggctgaagcggaccgcccggcggcggtacacccggcggaagaaccggatctgctacctgcaggagatcttcagcaacgagatggccaaggtggacgacagcttcttccaccggctggaggagagcttcctggtggaggaggacaagaagcacgagcggcaccccatcttcggcaacatcgtggacgaggtggcctaccacgagaagtaccccaccatctaccacctgcggaagaagctggtggacagcaccgacaaggccgacctgcggctgatctacctggccctggcccacatgatcaagttccggggccacttcctgatcgagggcgacctgaaccccgacaacagcgacgtggacaagctgttcatccagctggtgcagacctacaaccagctgttcgaggagaaccccatcaacgccagcggcgtggacgccaaggccatcctgagcgcccggctgagcaagagccggcggctggagaacctgatcgcccagctgcccggcgagaagaagaacggcctgttcggcaacctgatcgccctgagcctgggcctgacccccaacttcaagagcaacttcgacctggccgaggacgccaagctgcagctgagcaaggacacctacgacgacgacctggacaacctgctggcccagatcggcgaccagtacgccgacctgttcctggccgccaagaacctgagcgacgccatcctgctgagcgacatcctgcgggtgaacaccgagatcaccaaggcccccctgagcgccagcatgatcaagcggtacgacgagcaccaccaggacctgaccctgctgaaggccctggtgcggcagcagctgcccgagaagtacaaggagatcttcttcgaccagagcaagaacggctacgccggctacatcgacggcggcgccagccaggaggagttctacaagttcatcaagcccatcctggagaagatggacggcaccgaggagctgctggtgaagctgaaccgggaggacctgctgcggaagcagcggaccttcgacaacggcagcatcccccaccagatccacctgggcgagctgcacgccatcctgcggcggcaggaggacttctaccccttcctgaaggacaaccgggagaagatcgagaagatcctgaccttccggatcccctactacgtgggccccctggcccggggcaacagccggttcgcctggatgacccggaagagcgaggagaccatcaccccctggaacttcgaggaggtggtggacaagggcgccagcgcccagagcttcatcgagcggatgaccaacttcgacaagaacctgcccaacgagaaggtgctgcccaagcacagcctgctgtacgagtacttcaccgtgtacaacgagctgaccaaggtgaagtacgtgaccgagggcatgcggaagcccgccttcctgagcggcgagcagaagaaggccatcgtggacctgctgttcaagaccaaccggaaggtgaccgtgaagcagctgaaggaggactacttcaagaagatcgagtgcttcgacagcgtggagatcagcggcgtggaggaccggttcaacgccagcctgggcacctaccacgacctgctgaagatcatcaaggacaaggacttcctggacaacgaggagaacgaggacatcctggaggacatcgtgctgaccctgaccctgttcgaggaccgggagatgatcgaggagcggctgaagacctacgcccacctgttcgacgacaaggtgatgaagcagctgaagcggcggcggtacaccggctggggccggctgagccggaagctgatcaacggcatccgggacaagcagagcggcaagaccatcctggacttcctgaagagcgacggcttcgccaaccggaacttcatgcagctgatccacgacgacagcctgaccttcaaggaggacatccagaaggcccaggtgagcggccagggcgacagcctgcacgagcacatcgccaacctggccggcagccccgccatcaagaagggcatcctgcagaccgtgaaggtggtggacgagctggtgaaggtgatgggccggcacaagcccgagaacatcgtgatcgagatggcccgggagaaccagaccacccagaagggccagaagaacagccgggagcggatgaagcggatcgaggagggcatcaaggagctgggcagccagatcctgaaggagcaccccgtggagaacacccagctgcagaacgagaagctgtacctgtactacctgcagaacggccgggacatgtacgtggaccaggagctggacatcaaccggctgagcgactacgacgtggaccacatcgtgccccagagcttcctgaaggacgacagcatcgacaacaaggtgctgacccggagcgacaagaaccggggcaagagcgacaacgtgcccagcgaggaggtggtgaagaagatgaagaactactggcggcagctgctgaacgccaagctgatcacccagcggaagttcgacaacctgaccaaggccgagcggggcggcctgagcgagctggacaaggccggcttcatcaagcggcagctggtggagacccggcagatcaccaagcacgtggcccagatcctggacagccggatgaacaccaagtacgacgagaacgacaagctgatccgggaggtgaaggtgatcaccctgaagagcaagctggtgagcgacttccggaaggacttccagttctacaaggtgcgggagatcaacaactaccaccacgcccacgacgcctacctgaacgccgtggtgggcaccgccctgatcaagaagtaccccaagctggagagcgagttcgtgtacggcgactacaaggtgtacgacgtgcggaagatgatcgccaagagcgagcaggagatcggcaaggccaccgccaagtacttcttctacagcaacatcatgaacttcttcaagaccgagatcaccctggccaacggcgagatccggaagcggcccctgatcgagaccaacggcgagaccggcgagatcgtgtgggacaagggccgggacttcgccaccgtgcggaaggtgctgagcatgccccaggtgaacatcgtgaagaagaccgaggtgcagaccggcggcttcagcaaggagagcatcctgcccaagcggaacagcgacaagctgatcgcccggaagaaggactgggaccccaagaagtacggcggcttcgacagccccaccgtggcctacagcgtgctggtggtggccaaggtggagaagggcaagagcaagaagctgaagagcgtgaaggagctgctgggcatcaccatcatggagcggagcagcttcgagaagaaccccatcgacttcctggaggccaagggctacaaggaggtgaagaaggacctgatcatcaagctgcccaagtacagcctgttcgagctggagaacggccggaagcggatgctggccagcgccggcgagctgcagaagggcaacgagctggccctgcccagcaagtacgtgaacttcctgtacctggccagccactacgagaagctgaagggcagccccgaggacaacgagcagaagcagctgttcgtggagcagcacaagcactacctggacgagatcatcgagcagatcagcgagttcagcaagcgggtgatcctggccgacgccaacctggacaaggtgctgagcgcctacaacaagcaccgggacaagcccatccgggagcaggccgagaacatcatccacctgttcaccctgaccaacctgggcgcccccgccgccttcaagtacttcgacaccaccatcgaccggaagcggtacaccagcaccaaggaggtgctggacgccaccctgatccaccagagcatcaccggcctgtacgagacccggatcgacctgagccagctgggcggcgacggcggcggcagccccaagaagaagcggaaggtg

SEQ ID NO: 57 - DNA, 4173 bp, synthetic construct
  source 1..4173: mol_type = other DNA
gacaagaagtacagcatcggcctggccatcggcaccaacagcgtgggctgggccgtgatcaccgacgagtacaaggtgcccagcaagaagttcaaggtgctgggcaacaccgaccggcacagcatcaagaagaacctgatcggcgccctgctgttcgacagcggcgagaccgccgaggccacccggctgaagcggaccgcccggcggcggtacacccggcggaagaaccggatctgctacctgcaggagatcttcagcaacgagatggccaaggtggacgacagcttcttccaccggctggaggagagcttcctggtggaggaggacaagaagcacgagcggcaccccatcttcggcaacatcgtggacgaggtggcctaccacgagaagtaccccaccatctaccacctgcggaagaagctggtggacagcaccgacaaggccgacctgcggctgatctacctggccctggcccacatgatcaagttccggggccacttcctgatcgagggcgacctgaaccccgacaacagcgacgtggacaagctgttcatccagctggtgcagacctacaaccagctgttcgaggagaaccccatcaacgccagcggcgtggacgccaaggccatcctgagcgcccggctgagcaagagccggcggctggagaacctgatcgcccagctgcccggcgagaagaagaacggcctgttcggcaacctgatcgccctgagcctgggcctgacccccaacttcaagagcaacttcgacctggccgaggacgccaagctgcagctgagcaaggacacctacgacgacgacctggacaacctgctggcccagatcggcgaccagtacgccgacctgttcctggccgccaagaacctgagcgacgccatcctgctgagcgacatcctgcgggtgaacaccgagatcaccaaggcccccctgagcgccagcatgatcaagcggtacgacgagcaccaccaggacctgaccctgctgaaggccctggtgcggcagcagctgcccgagaagtacaaggagatcttcttcgaccagagcaagaacggctacgccggctacatcgacggcggcgccagccaggaggagttctacaagttcatcaagcccatcctggagaagatggacggcaccgaggagctgctggtgaagctgaaccgggaggacctgctgcggaagcagcggaccttcgacaacggcagcatcccccaccagatccacctgggcgagctgcacgccatcctgcggcggcaggaggacttctaccccttcctgaaggacaaccgggagaagatcgagaagatcctgaccttccggatcccctactacgtgggccccctggcccggggcaacagccggttcgcctggatgacccggaagagcgaggagaccatcaccccctggaacttcgaggaggtggtggacaagggcgccagcgcccagagcttcatcgagcggatgaccaacttcgacaagaacctgcccaacgagaaggtgctgcccaagcacagcctgctgtacgagtacttcaccgtgtacaacgagctgaccaaggtgaagtacgtgaccgagggcatgcggaagcccgccttcctgagcggcgagcagaagaaggccatcgtggacctgctgttcaagaccaaccggaaggtgaccgtgaagcagctgaaggaggactacttcaagaagatcgagtgcttcgacagcgtggagatcagcggcgtggaggaccggttcaacgccagcctgggcacctaccacgacctgctgaagatcatcaaggacaaggacttcctggacaacgaggagaacgaggacatcctggaggacatcgtgctgaccctgaccctgttcgaggaccgggagatgatcgaggagcggctgaagacctacgcccacctgttcgacgacaaggtgatgaagcagctgaagcggcggcggtacaccggctggggccggctgagccggaagctgatcaacggcatccgggacaagcagagcggcaagaccatcctggacttcctgaagagcgacggcttcgccaaccggaacttcatgcagctgatccacgacgacagcctgaccttcaaggaggacatccagaaggcccaggtgagcggccagggcgacagcctgcacgagcacatcgccaacctggccggcagccccgccatcaagaagggcatcctgcagaccgtgaaggtggtggacgagctggtgaaggtgatgggccggcacaagcccgagaacatcgtgatcgagatggcccgggagaaccagaccacccagaagggccagaagaacagccgggagcggatgaagcggatcgaggagggcatcaaggagctgggcagccagatcctgaaggagcaccccgtggagaacacccagctgcagaacgagaagctgtacctgtactacctgcagaacggccgggacatgtacgtggaccaggagctggacatcaaccggctgagcgactacgacgtggaccacatcgtgccccagagcttcctgaaggacgacagcatcgacaacaaggtgctgacccggagcgacaagaaccggggcaagagcgacaacgtgcccagcgaggaggtggtgaagaagatgaagaactactggcggcagctgctgaacgccaagctgatcacccagcggaagttcgacaacctgaccaaggccgagcggggcggcctgagcgagctggacaaggccggcttcatcaagcggcagctggtggagacccggcagatcaccaagcacgtggcccagatcctggacagccggatgaacaccaagtacgacgagaacgacaagctgatccgggaggtgaaggtgatcaccctgaagagcaagctggtgagcgacttccggaaggacttccagttctacaaggtgcgggagatcaacaactaccaccacgcccacgacgcctacctgaacgccgtggtgggcaccgccctgatcaagaagtaccccaagctggagagcgagttcgtgtacggcgactacaaggtgtacgacgtgcggaagatgatcgccaagagcgagcaggagatcggcaaggccaccgccaagtacttcttctacagcaacatcatgaacttcttcaagaccgagatcaccctggccaacggcgagatccggaagcggcccctgatcgagaccaacggcgagaccggcgagatcgtgtgggacaagggccgggacttcgccaccgtgcggaaggtgctgagcatgccccaggtgaacatcgtgaagaagaccgaggtgcagaccggcggcttcagcaaggagagcatcctgcccaagcggaacagcgacaagctgatcgcccggaagaaggactgggaccccaagaagtacggcggcttcgacagccccaccgtggcctacagcgtgctggtggtggccaaggtggagaagggcaagagcaagaagctgaagagcgtgaaggagctgctgggcatcaccatcatggagcggagcagcttcgagaagaaccccatcgacttcctggaggccaagggctacaaggaggtgaagaaggacctgatcatcaagctgcccaagtacagcctgttcgagctggagaacggccggaagcggatgctggccagcgccggcgagctgcagaagggcaacgagctggccctgcccagcaagtacgtgaacttcctgtacctggccagccactacgagaagctgaagggcagccccgaggacaacgagcagaagcagctgttcgtggagcagcacaagcactacctggacgagatcatcgagcagatcagcgagttcagcaagcgggtgatcctggccgacgccaacctggacaaggtgctgagcgcctacaacaagcaccgggacaagcccatccgggagcaggccgagaacatcatccacctgttcaccctgaccaacctgggcgcccccgccgccttcaagtacttcgacaccaccatcgaccggaagcggtacaccagcaccaaggaggtgctggacgccaccctgatccaccagagcatcaccggcctgtacgagacccggatcgacctgagccagctgggcggcgacggcagcggcagccccaagaagaagcggaaggtggacggcagccccaagaagaagcggaaggtggacagcggc

SEQ ID NO: 58 - DNA, 4101 bp, synthetic construct
  source 1..4101: mol_type = other DNA
gacaagaagtacagcatcggcctggccatcggcaccaacagcgtgggctgggccgtgatcaccgacgagtacaaggtgcccagcaagaagttcaaggtgctgggcaacaccgaccggcacagcatcaagaagaacctgatcggcgccctgctgttcgacagcggcgagaccgccgaggccacccggctgaagcggaccgcccggcggcggtacacccggcggaagaaccggatctgctacctgcaggagatcttcagcaacgagatggccaaggtggacgacagcttcttccaccggctggaggagagcttcctggtggaggaggacaagaagcacgagcggcaccccatcttcggcaacatcgtggacgaggtggcctaccacgagaagtaccccaccatctaccacctgcggaagaagctggtggacagcaccgacaaggccgacctgcggctgatctacctggccctggcccacatgatcaagttccggggccacttcctgatcgagggcgacctgaaccccgacaacagcgacgtggacaagctgttcatccagctggtgcagacctacaaccagctgttcgaggagaaccccatcaacgccagcggcgtggacgccaaggccatcctgagcgcccggctgagcaagagccggcggctggagaacctgatcgcccagctgcccggcgagaagaagaacggcctgttcggcaacctgatcgccctgagcctgggcctgacccccaacttcaagagcaacttcgacctggccgaggacgccaagctgcagctgagcaaggacacctacgacgacgacctggacaacctgctggcccagatcggcgaccagtacgccgacctgttcctggccgccaagaacctgagcgacgccatcctgctgagcgacatcctgcgggtgaacaccgagatcaccaaggcccccctgagcgccagcatgatcaagcggtacgacgagcaccaccaggacctgaccctgctgaaggccctggtgcggcagcagctgcccgagaagtacaaggagatcttcttcgaccagagcaagaacggctacgccggctacatcgacggcggcgccagccaggaggagttctacaagttcatcaagcccatcctggagaagatggacggcaccgaggagctgctggtgaagctgaaccgggaggacctgctgcggaagcagcggaccttcgacaacggcagcatcccccaccagatccacctgggcgagctgcacgccatcctgcggcggcaggaggacttctaccccttcctgaaggacaaccgggagaagatcgagaagatcctgaccttccggatcccctactacgtgggccccctggcccggggcaacagccggttcgcctggatgacccggaagagcgaggagaccatcaccccctggaacttcgaggaggtggtggacaagggcgccagcgcccagagcttcatcgagcggatgaccaacttcgacaagaacctgcccaacgagaaggtgctgcccaagcacagcctgctgtacgagtacttcaccgtgtacaacgagctgaccaaggtgaagtacgtgaccgagggcatgcggaagcccgccttcctgagcggcgagcagaagaaggccatcgtggacctgctgttcaagaccaaccggaaggtgaccgtgaagcagctgaaggaggactacttcaagaagatcgagtgcttcgacagcgtggagatcagcggcgtggaggaccggttcaacgccagcctgggcacctaccacgacctgctgaagatcatcaaggacaaggacttcctggacaacgaggagaacgaggacatcctggaggacatcgtgctgaccctgaccctgttcgaggaccgggagatgatcgaggagcggctgaagacctacgcccacctgttcgacgacaaggtgatgaagcagctgaagcggcggcggtacaccggctggggccggctgagccggaagctgatcaacggcatccgggacaagcagagcggcaagaccatcctggacttcctgaagagcgacggcttcgccaaccggaacttcatgcagctgatccacgacgacagcctgaccttcaaggaggacatccagaaggcccaggtgagcggccagggcgacagcctgcacgagcacatcgccaacctggccggcagccccgccatcaagaagggcatcctgcagaccgtgaaggtggtggacgagctggtgaaggtgatgggccggcacaagcccgagaacatcgtgatcgagatggcccgggagaaccagaccacccagaagggccagaagaacagccgggagcggatgaagcggatcgaggagggcatcaaggagctgggcagccagatcctgaaggagcaccccgtggagaacacccagctgcagaacgagaagctgtacctgtactacctgcagaacggccgggacatgtacgtggaccaggagctggacatcaaccggctgagcgactacgacgtggaccacatcgtgccccagagcttcctgaaggacgacagcatcgacaacaaggtgctgacccggagcgacaagaaccggggcaagagcgacaacgtgcccagcgaggaggtggtgaagaagatgaagaactactggcggcagctgctgaacgccaagctgatcacccagcggaagttcgacaacctgaccaaggccgagcggggcggcctgagcgagctggacaaggccggcttcatcaagcggcagctggtggagacccggcagatcaccaagcacgtggcccagatcctggacagccggatgaacaccaagtacgacgagaacgacaagctgatccgggaggtgaaggtgatcaccctgaagagcaagctggtgagcgacttccggaaggacttccagttctacaaggtgcgggagatcaacaactaccaccacgcccacgacgcctacctgaacgccgtggtgggcaccgccctgatcaagaagtaccccaagctggagagcgagttcgtgtacggcgactacaaggtgtacgacgtgcggaagatgatcgccaagagcgagcaggagatcggcaaggccaccgccaagtacttcttctacagcaacatcatgaacttcttcaagaccgagatcaccctggccaacggcgagatccggaagcggcccctgatcgagaccaacggcgagaccggcgagatcgtgtgggacaagggccgggacttcgccaccgtgcggaaggtgctgagcatgccccaggtgaacatcgtgaagaagaccgaggtgcagaccggcggcttcagcaaggagagcatcctgcccaagcggaacagcgacaagctgatcgcccggaagaaggactgggaccccaagaagtacggcggcttcgacagccccaccgtggcctacagcgtgctggtggtggccaaggtggagaagggcaagagcaagaagctgaagagcgtgaaggagctgctgggcatcaccatcatggagcggagcagcttcgagaagaaccccatcgacttcctggaggccaagggctacaaggaggtgaagaaggacctgatcatcaagctgcccaagtacagcctgttcgagctggagaacggccggaagcggatgctggccagcgccggcgagctgcagaagggcaacgagctggccctgcccagcaagtacgtgaacttcctgtacctggccagccactacgagaagctgaagggcagccccgaggacaacgagcagaagcagctgttcgtggagcagcacaagcactacctggacgagatcatcgagcagatcagcgagttcagcaagcgggtgatcctggccgacgccaacctggacaaggtgctgagcgcctacaacaagcaccgggacaagcccatccgggagcaggccgagaacatcatccacctgttcaccctgaccaacctgggcgcccccgccgccttcaagtacttcgacaccaccatcgaccggaagcggtacaccagcaccaaggaggtgctggacgccaccctgatccaccagagcatcaccggcctgtacgagacccggatcgacctgagccagctgggcggcgac

SEQ ID NO: 59 - protein, 9 aa, unidentified
LAAKRSRTT

SEQ ID NO: 60 - protein, 9 aa, unidentified
QAAKRSRTT

SEQ ID NO: 61 - protein, 10 aa, unidentified
PAPAKRERTT

SEQ ID NO: 62 - protein, 9 aa, unidentified
QAAKRPRTT

SEQ ID NO: 63 - protein, 9 aa, unidentified
RAAKRPRTT

SEQ ID NO: 64 - protein, 11 aa, unidentified
AAAKRSWSMAA

SEQ ID NO: 65 - protein, 11 aa, unidentified
AAAKRVWSMAF

SEQ ID NO: 66 - protein, 11 aa, unidentified
AAAKRSWSMAF

SEQ ID NO: 67 - protein, 10 aa, unidentified
AAAKRKYFAA

SEQ ID NO: 68 - protein, 10 aa, unidentified
RAAKRKAFAA

SEQ ID NO: 69 - protein, 10 aa, unidentified
RAAKRKYFAV

SEQ ID NO: 70 - protein, 7 aa, Simian virus 40
PKKKRRV

SEQ ID NO: 71 - protein, 16 aa, unidentified
KRPAATKKAGQAKKKK

SEQ ID NO: 72 - skipped

SEQ ID NO: 73 - protein, 5 aa, synthetic construct
GGGGS

SEQ ID NO: 74 - protein, 5 aa, synthetic construct
EAAAK

SEQ ID NO: 75 - protein, 5 aa, synthetic construct
SEGSA

SEQ ID NO: 76 - protein, 9 aa, synthetic construct
SEGSAGTST

SEQ ID NO: 77 - protein, 10 aa, synthetic construct
GGGGSGGGGS

SEQ ID NO: 78 - protein, 10 aa, synthetic construct
GGGGSEAAAK

SEQ ID NO: 79 - protein, 10 aa, synthetic construct
EAAAKGGGGS

SEQ ID NO: 80 - protein, 10 aa, synthetic construct
EAAAKEAAAK

SEQ ID NO: 81 - protein, 15 aa, synthetic construct
SEGSAGTSTESEGSA

SEQ ID NO: 82 - protein, 15 aa, synthetic construct
GGGGSGGGGSGGGGS

SEQ ID NO: 83 - protein, 15 aa, synthetic construct
GGGGSGGGGSEAAAK

SEQ ID NO: 84 - protein, 15 aa, synthetic construct
GGGGSEAAAKGGGGS

SEQ ID NO: 85 - protein, 15 aa, synthetic construct
EAAAKGGGGSEAAAK

SEQ ID NO: 86 - protein, 15 aa, synthetic construct
EAAAKEAAAKGGGGS

SEQ ID NO: 87 - protein, 20 aa, synthetic construct
SEGSAGTSTESEGSAGTSTE

SEQ ID NO: 88 - protein, 20 aa, synthetic construct
GGGGSGGGGSGGGGSEAAAK

SEQ ID NO: 89 - protein, 20 aa, synthetic construct
GGGGSGGGGSEAAAKGGGGS

SEQ ID NO: 90 - protein, 20 aa, synthetic construct
GGGGSEAAAKGGGGSEAAAK

SEQ ID NO: 91 - protein, 20 aa, synthetic construct
GGGGSEAAAKEAAAKGGGGS

SEQ ID NO: 92 - protein, 20 aa, synthetic construct
GGGGSEAAAKEAAAKEAAAK

SEQ ID NO: 93 - protein, 20 aa, synthetic construct
EAAAKGGGGSGGGGSGGGGS

SEQ ID NO: 94 - protein, 20 aa, synthetic construct
EAAAKGGGGSGGGGSEAAAK

SEQ ID NO: 95 - protein, 20 aa, synthetic construct
EAAAKGGGGSEAAAKGGGGS

SEQ ID NO: 96 - protein, 20 aa, synthetic construct
EAAAKGGGGSEAAAKEAAAK

SEQ ID NO: 97 - protein, 20 aa, synthetic construct
EAAAKEAAAKGGGGSGGGGS

SEQ ID NO: 98 - protein, 20 aa, synthetic construct
EAAAKEAAAKGGGGSEAAAK

SEQ ID NO: 99 - protein, 20 aa, synthetic construct
EAAAKEAAAKEAAAKGGGGS

SEQ ID NO: 100 - protein, 25 aa, synthetic construct
SEGSAGTSTESEGSAGTSTESEGSA

SEQ ID NO: 101 - protein, 25 aa, synthetic construct
GGGGSGGGGSGGGGSGGGGSGGGGS

SEQ ID NO: 102 - protein, 25 aa, synthetic construct
GGGGSGGGGSGGGGSGGGGSEAAAK

SEQ ID NO: 103 - protein, 25 aa, synthetic construct
GGGGSGGGGSGGGGSEAAAKGGGGS

SEQ ID NO: 104 - protein, 25 aa, synthetic construct
GGGGSGGGGSGGGGSEAAAKEAAAK

SEQ ID NO: 105 - protein, 25 aa, synthetic construct
GGGGSGGGGSEAAAKGGGGSGGGGS

SEQ ID NO: 106 - protein, 25 aa, synthetic construct
GGGGSGGGGSEAAAKGGGGSEAAAK

SEQ ID NO: 107 - protein, 25 aa, synthetic construct
GGGGSGGGGSEAAAKEAAAKGGGGS

SEQ ID NO: 108 - protein, 25 aa, synthetic construct
GGGGSGGGGSEAAAKEAAAKEAAAK

SEQ ID NO: 109 - protein, 25 aa, synthetic construct
GGGGSEAAAKGGGGSGGGGSGGGGS

SEQ ID NO: 110 - protein, 25 aa, synthetic construct
GGGGSEAAAKGGGGSGGGGSEAAAK

SEQ ID NO: 111 - protein, 25 aa, synthetic construct
GGGGSEAAAKGGGGSEAAAKGGGGS

SEQ ID NO: 112 - protein, 25 aa, synthetic construct
GGGGSEAAAKGGGGSEAAAKEAAAK

SEQ ID NO: 113 - protein, 25 aa, synthetic construct
GGGGSEAAAKEAAAKGGGGSGGGGS

SEQ ID NO: 114 - protein, 25 aa, synthetic construct
GGGGSEAAAKEAAAKEAAAKGGGGS

SEQ ID NO: 115 - protein, 25 aa, synthetic construct
GGGGSEAAAKEAAAKEAAAKEAAAK

SEQ ID NO: 116 - protein, 25 aa, synthetic construct
EAAAKGGGGSGGGGSGGGGSGGGGS

SEQ ID NO: 117 - protein, 25 aa, synthetic construct
EAAAKGGGGSGGGGSGGGGSEAAAK

SEQ ID NO: 118 - protein, 25 aa, synthetic construct
EAAAKGGGGSGGGGSEAAAKGGGGS

SEQ ID NO: 119 - protein, 25 aa, synthetic construct
EAAAKGGGGSGGGGSEAAAKEAAAK

SEQ ID NO: 120 - protein, 25 aa, synthetic construct
EAAAKGGGGSEAAAKGGGGSGGGGS

SEQ ID NO: 121 - protein, 25 aa, synthetic construct
EAAAKGGGGSEAAAKGGGGSEAAAK

SEQ ID NO: 122 - protein, 25 aa, synthetic construct
EAAAKGGGGSEAAAKEAAAKGGGGS

SEQ ID NO: 123 - protein, 25 aa, synthetic construct
EAAAKGGGGSEAAAKEAAAKEAAAK

SEQ ID NO: 124 - protein, 25 aa, synthetic construct
EAAAKEAAAKGGGGSEAAAKGGGGS

SEQ ID NO: 125 - protein, 25 aa, synthetic construct
EAAAKEAAAKGGGGSEAAAKEAAAK

SEQ ID NO: 126 - protein, 25 aa, synthetic construct
EAAAKEAAAKEAAAKGGGGSEAAAK

SEQ ID NO: 127 - protein, 25 aa, synthetic construct
EAAAKEAAAKEAAAKEAAAKGGGGS

SEQ ID NO: 128 - protein, 25 aa, synthetic construct
EAAAKEAAAKEAAAKEAAAKEAAAK

SEQ ID NO: 129 - protein, 16 aa, synthetic construct
GTKDSTKDIPETPSKD

SEQ ID NO: 130 - protein, 16 aa, synthetic construct
GRDVRQPEVKEEKPES

SEQ ID NO: 131 - protein, 16 aa, synthetic construct
EGKSSGSGSESKSTAG

SEQ ID NO: 132 - protein, 16 aa, synthetic construct
TPGSPAGSPTSTEEGT

SEQ ID NO: 133 - protein, 16 aa, synthetic construct
GSEPATSGSETPGTST

SEQ ID NO: 134 - RNA, 4136 nt, synthetic construct
  source 1..4136: mol_type = other RNA
gggaagctcagaataaacgctcaactttggccggatctgccaccatggaggcctcccccgcctccggcccccggcacctgatggacccccacatcttcacctccaacttcaacaacggcatcggccggcacaagacctacctgtgctacgaggtggagcggctggacaacggcacctccgtgaagatggaccagcaccggggcttcctgcacaaccaggccaagaacctgctgtgcggcttctacggccggcacgccgagctgcggttcctggacctggtgccctccctgcagctggaccccgcccagatctaccgggtgacctggttcatctcctggtccccctgcttctcctggggctgcgccggcgaggtgcgggccttcctgcaggagaacacccacgtgcggctgcggatcttcgccgcccggatctacgactacgaccccctgtacaaggaggccctgcagatgctgcgggacgccggcgcccaggtgtccatcatgacctacgacgagttcaagcactgctgggacaccttcgtggaccaccagggctgccccttccagccctgggacggcctggacgagcactcccaggccctgtccggccggctgcgggccatcctgcagaaccagggcaactccggctccgagacccccggcacctccgagtccgccacccccgagtccgcagcgttcaaaccaaatcccatcaactacatcctgggcctggccatcggcatcgcctccgtgggctgggccatggtggagatcgacgaggaggagaaccccatccggctgatcgacctgggcgtgcgggtgttcgagcgggccgaggtgcccaagaccggcgactccctggccatggcccggcggctggcccggtccgtgcggcggctgacccggcggcgggcccaccggctgctgcgggcccggcggctgctgaagcgggagggcgtgctgcaggccgccgacttcgacgagaacggcctgatcaagtccctgcccaacaccccctggcagctgcgggccgccgccctggaccggaagctgacccccctggagtggtccgccgtgctgctgcacctgatcaagcaccggggctacctgtcccagcggaagaacgagggcgagaccgccgacaaggagctgggcgccctgctgaagggcgtggccaacaacgcccacgccctgcagaccggcgacttccggacccccgccgagctggccctgaacaagttcgagaaggagtccggccacatccggaaccagcggggcgactactcccacaccttctcccggaaggacctgcaggccgagctgatcctgctgttcgagaagcagaaggagttcggcaacccccacgtgtccggcggcctgaaggagggcatcgagaccctgctgatgacccagcggcccgccctgtccggcgacgccgtgcagaagatgctgggccactgcaccttcgagcccgccgagcccaaggccgccaagaacacctacaccgccgagcggttcatctggctgaccaagctgaacaacctgcggatcctggagcagggctccgagcggcccctgaccgacaccgagcgggccaccctgatggacgagccctaccggaagtccaagctgacctacgcccaggcccggaagctgctgggcctggaggacaccgccttcttcaagggcctgcggtacggcaaggacaacgccgaggcctccaccctgatggagatgaaggcctaccacgccatctcccgggccctggagaaggagggcctgaaggacaagaagtcccccctgaacctgtcctccgagctgcaggacgagatcggcaccgccttctccctgttcaagaccgacgaggacatcaccggccggctgaaggaccgggtgcagcccgagatcctggaggccctgctgaagcacatctccttcgacaagttcgtgcagatctccctgaaggccctgcggcggatcgtgcccctgatggagcagggcaagcggtacgacgaggcctgcgccgagatctacggcgaccactacggcaagaagaacaccgaggagaagatctacctgccccccatccccgccgacgagatccggaaccccgtggtgctgcgggccctgtcccaggcccggaaggtgatcaacggcgtggtgcggcggtacggctcccccgcccggatccacatcgagaccgcccgggaggtgggcaagtccttcaaggaccggaaggagatcgagaagcggcaggaggagaaccggaaggaccgggagaaggccgccgccaagttccgggagtacttccccaacttcgtgggcgagcccaagtccaaggacatcctgaagctgcggctgtacgagcagcagcacggcaagtgcctgtactccggcaaggagatcaacctggtgcggctgaacgagaagggctacgtggagatcgaccacgccctgcccttctcccggacctgggacgactccttcaacaacaaggtgctggtgctgggctccgagaaccagaacaagggcaaccagaccccctacgagtacttcaacggcaaggacaactcccgggagtggcaggagttcaaggcccgggtggagacctcccggttcccccggtccaagaagcagcggatcctgctgcagaagttcgacgaggacggcttcaaggagtgcaacctgaacgacacccggtacgtgaaccgcttcctgtgccagttcgtggccgaccacatcctgctgaccggcaagggcaagcggcgggtgttcgcctccaacggccagatcaccaacctgctgcggggcttctggggcctgcggaaggtgcgggccgagaacgaccggcaccacgccctggacgccgtggtggtggcctgctccaccgtggccatgcagcagaagatcacccggttcgtgcggtacaaggagatgaacgccttcgacggcaagaccatcgacaaggagaccggcaaggtgctgcaccagaagacccacttcccccagccctgggagttcttcgcccaggaggtgatgatccgggtgttcggcaagcccgacggcaagcccgagttcgaggaggccgacacccccgagaagctgcggaccctgctggccgagaagctgtcctcccggcccgaggccgtgcacgagtacgtgacccccctgttcgtgtcccgggcccccaaccggaagatgtccggcgcccacaaggacaccctgcggtccgccaagcggttcgtgaagcacaacgagaagatctccgtgaagcgggtgtggctgaccgagatcaagctggccgacctggagaacatggtgaactacaagaacggccgggagatcgagctgtacgaggccctgaaggcccggctggaggcctacggcggcaacgccaagcaggccttcgaccccaaggacaaccccttctacaagaagggcggccagctggtgaaggccgtgcgggtggagaagacccaggagtccggcgtgctgctgaacaagaagaacgcctacaccatcgccgacaacggcgacatggtgcgggtggacgtgttctgcaaggtggacaagaagggcaagaaccagtacttcatcgtgcccatctacgcctggcaggtggccgagaacatcctgcccgacatcgactgcaagggctaccggatcgacgactcctacaccttctgcttctccctgcacaagtacgacctgatcgccttccagaaggacgagaagtccaaggtggagttcgcctactacatcaactgcgactcctccaacggccggttctacctggcctggcacgacaagggctccaaggagcagcagttccggatctccacccagaacctggtgctgatccagaagtaccaggtgaacgagctgggcaaggagatccggccctgccggctgaagaagcggccccccgtgcggtccggaaagcggaccgccgacggctccgagttcgagtcccccaagaagaagcggaaggtggagtagtgactagcaccagcctcaagaacacccgaatggagtctctaagctacataataccaacttacactttacaaaatgttgtcccccaaaatgtagccattcgtatctgctcctaataaaaagaaagtttcttcacattct

SEQ ID NO: 135 - RNA, 3954 nt, synthetic construct
  source 1..3954: mol_type = other RNA
atggaggcctcccccgcctccggcccccggcacctgatggacccccacatcttcacctccaacttcaacaacggcatcggccggcacaagacctacctgtgctacgaggtggagcggctggacaacggcacctccgtgaagatggaccagcaccggggcttcctgcacaaccaggccaagaacctgctgtgcggcttctacggccggcacgccgagctgcggttcctggacctggtgccctccctgcagctggaccccgcccagatctaccgggtgacctggttcatctcctggtccccctgcttctcctggggctgcgccggcgaggtgcgggccttcctgcaggagaacacccacgtgcggctgcggatcttcgccgcccggatctacgactacgaccccctgtacaaggaggccctgcagatgctgcgggacgccggcgcccaggtgtccatcatgacctacgacgagttcaagcactgctgggacaccttcgtggaccaccagggctgccccttccagccctgggacggcctggacgagcactcccaggccctgtccggccggctgcgggccatcctgcagaaccagggcaactccggctccgagacccccggcacctccgagtccgccacccccgagtccgcagcgttcaaaccaaatcccatcaactacatcctgggcctggccatcggcatcgcctccgtgggctgggccatggtggagatcgacgaggaggagaaccccatccggctgatcgacctgggcgtgcgggtgttcgagcgggccgaggtgcccaagaccggcgactccctggccatggcccggcggctggcccggtccgtgcggcggctgacccggcggcgggcccaccggctgctgcgggcccggcggctgctgaagcgggagggcgtgctgcaggccgccgacttcgacgagaacggcctgatcaagtccctgcccaacaccccctggcagctgcgggccgccgccctggaccggaagctgacccccctggagtggtccgccgtgctgctgcacctgatcaagcaccggggctacctgtcccagcggaagaacgagggcgagaccgccgacaaggagctgggcgccctgctgaagggcgtggccaacaacgcccacgccctgcagaccggcgacttccggacccccgccgagctggccctgaacaagttcgagaaggagtccggccacatccggaaccagcggggcgactactcccacaccttctcccggaaggacctgcaggccgagctgatcctgctgttcgagaagcagaaggagttcggcaacccccacgtgtccggcggcctgaaggagggcatcgagaccctgctgatgacccagcggcccgccctgtccggcgacgccgtgcagaagatgctgggccactgcaccttcgagcccgccgagcccaaggccgccaagaacacctacaccgccgagcggttcatctggctgaccaagctgaacaacctgcggatcctggagcagggctccgagcggcccctgaccgacaccgagcgggccaccctgatggacgagccctaccggaagtccaagctgacctacgcccaggcccggaagctgctgggcctggaggacaccgccttcttcaagggcctgcggtacggcaaggacaacgccgaggcctccaccctgatggagatgaaggcctaccacgccatctcccgggccctggagaaggagggcctgaaggacaagaagtcccccctgaacctgtcctccgagctgcaggacgagatcggcaccgccttctccctgttcaagaccgacgaggacatcaccggccggctgaaggaccgggtgcagcccgagatcctggaggccctgctgaagcacatctccttcgacaagttcgtgcagatctccctgaaggccctgcggcggatcgtgcccctgatggagcagggcaagcggtacgacgaggcctgcgccgagatctacggcgaccactacggcaagaagaacaccgaggagaagatctacctgccccccatccccgccgacgagatccggaaccccgtggtgctgcgggccctgtcccaggcccggaaggtgatcaacggcgtggtgcggcggtacggctcccccgcccggatccacatcgagaccgcccgggaggtgggcaagtccttcaaggaccggaaggagatcgagaagcggcaggaggagaaccggaaggaccgggagaaggccgccgccaagttccgggagtacttccccaacttcgtgggcgagcccaagtccaaggacatcctgaagctgcggctgtacgagcagcagcacggcaagtgcctgtactccggcaaggagatcaacctggtgcggctgaacgagaagggctacgtggagatcgaccacgccctgcccttctcccggacctgggacgactccttcaacaacaaggtgctggtgctgggctccgagaaccagaacaagggcaaccagaccccctacgagtacttcaacggcaaggacaactcccgggagtggcaggagttcaaggcccgggtggagacctcccggttcccccggtccaagaagcagcggatcctgctgcagaagttcgacgaggacggcttcaaggagtgcaacctgaacgacacccggtacgtgaaccgcttcctgtgccagttcgtggccgaccacatcctgctgaccggcaagggcaagcggcgggtgttcgcctccaacggccagatcaccaacctgctgcggggcttctggggcctgcggaaggtgcgggccgagaacgaccggcaccacgccctggacgccgtggtggtggcctgctccaccgtggccatgcagcagaagatcacccggttcgtgcggtacaaggagatgaacgccttcgacggcaagaccatcgacaaggagaccggcaaggtgctgcaccagaagacccacttcccccagccctgggagttcttcgcccaggaggtgatgatccgggtgttcggcaagcccgacggcaagcccgagttcgaggaggccgacacccccgagaagctgcggaccctgctggccgagaagctgtcctcccggcccgaggccgtgcacgagtacgtgacccccctgttcgtgtcccgggcccccaaccggaagatgtccggcgcccacaaggacaccctgcggtccgccaagcggttcgtgaagcacaacgagaagatctccgtgaagcgggtgtggctgaccgagatcaagctggccgacctggagaacatggtgaactacaagaacggccgggagatcgagctgtacgaggccctgaaggcccggctggaggcctacggcggcaacgccaagcaggccttcgaccccaaggacaaccccttctacaagaagggcggccagctggtgaaggccgtgcgggtggagaagacccaggagtccggcgtgctgctgaacaagaagaacgcctacaccatcgccgacaacggcgacatggtgcgggtggacgtgttctgcaaggtggacaagaagggcaagaaccagtacttcatcgtgcccatctacgcctggcaggtggccgagaacatcctgcccgacatcgactgcaagggctaccggatcgacgactcctacaccttctgcttctccctgcacaagtacgacctgatcgccttccagaaggacgagaagtccaaggtggagttcgcctactacatcaactgcgactcctccaacggccggttctacctggcctggcacgacaagggctccaaggagcagcagttccggatctccacccagaacctggtgctgatccagaagtaccaggtgaacgagctgggcaaggagatccggccctgccggctgaagaagcggccccccgtgcggtccggaaagcggaccgccgacggctccgagttcgagtcccccaagaagaagcggaaggtggagtag

SEQ ID NO: 136 - protein, 1317 aa, synthetic construct
MEASPASGPRHLMDPHIFTSNFNNGIGRHKTYLCYEVERLDNGTSVKMDQHRGFLHNQAKNLLCGFYGRHAELRFLDLVPSLQLDPAQIYRVTWFISWSPCFSWGCAGEVRAFLQENTHVRLRIFAARIYDYDPLYKEALQMLRDAGAQVSIMTYDEFKHCWDTFVDHQGCPFQPWDGLDEHSQALSGRLRAILQNQGNSGSETPGTSESATPESAAFKPNPINYILGLAIGIASVGWAMVEIDEEENPIRLIDLGVRVFERAEVPKTGDSLAMARRLARSVRRLTRRRAHRLLRARRLLKREGVLQAADFDENGLIKSLPNTPWQLRAAALDRKLTPLEWSAVLLHLIKHRGYLSQRKNEGETADKELGALLKGVANNAHALQTGDFRTPAELALNKFEKESGHIRNQRGDYSHTFSRKDLQAELILLFEKQKEFGNPHVSGGLKEGIETLLMTQRPALSGDAVQKMLGHCTFEPAEPKAAKNTYTAERFIWLTKLNNLRILEQGSERPLTDTERATLMDEPYRKSKLTYAQARKLLGLEDTAFFKGLRYGKDNAEASTLMEMKAYHAISRALEKEGLKDKKSPLNLSSELQDEIGTAFSLFKTDEDITGRLKDRVQPEILEALLKHISFDKFVQISLKALRRIVPLMEQGKRYDEACAEIYGDHYGKKNTEEKIYLPPIPADEIRNPVVLRALSQARKVINGVVRRYGSPARIHIETAREVGKSFKDRKEIEKRQEENRKDREKAAAKFREYFPNFVGEPKSKDILKLRLYEQQHGKCLYSGKEINLVRLNEKGYVEIDHALPFSRTWDDSFNNKVLVLGSENQNKGNQTPYEYFNGKDNSREWQEFKARVETSRFPRSKKQRILLQKFDEDGFKECNLNDTRYVNRFLCQFVADHILLTGKGKRRVFASNGQITNLLRGFWGLRKVRAENDRHHALDAVVVACSTVAMQQKITRFVRYKEMNAFDGKTIDKETGKVLHQKTHFPQPWEFFAQEVMIRVFGKPDGKPEFEEADTPEKLRTLLAEKLSSRPEAVHEYVTPLFVSRAPNRKMSGAHKDTLRSAKRFVKHNEKISVKRVWLTEIKLADLENMVNYKNGREIELYEALKARLEAYGGNAKQAFDPKDNPFYKKGGQLVKAVRVEKTQESGVLLNKKNAYTIADNGDMVRVDVFCKVDKKGKNQYFIVPIYAWQVAENILPDIDCKGYRIDDSYTFCFSLHKYDLIAFQKDEKSKVEFAYYINCDSSNGRFYLAWHDKGSKEQQFRISTQNLVLIQKYQVNELGKEIRPCRLKKRPPVRSGKRTADGSEFESPKKKRKVE

SEQ ID NO: 137 - RNA, 4250 nt, synthetic construct
  source 1..4250: mol_type = other RNA
gggaagctcagaataaacgctcaactttggccggatctgccaccatggacggctccggcggcggctcccccaagaagaagcggaaggtggaggacaagcggcccgccgccaccaagaaggccggccaggccaagaagaagaagggcggctccggcggcggcgaggcctcccccgcctccggcccccggcacctgatggacccccacatcttcacctccaacttcaacaacggcatcggccggcacaagacctacctgtgctacgaggtggagcggctggacaacggcacctccgtgaagatggaccagcaccggggcttcctgcacaaccaggccaagaacctgctgtgcggcttctacggccggcacgccgagctgcggttcctggacctggtgccctccctgcagctggaccccgcccagatctaccgggtgacctggttcatctcctggtccccctgcttctcctggggctgcgccggcgaggtgcgggccttcctgcaggagaacacccacgtgcggctgcggatcttcgccgcccggatctacgactacgaccccctgtacaaggaggccctgcagatgctgcgggacgccggcgcccaggtgtccatcatgacctacgacgagttcaagcactgctgggacaccttcgtggaccaccagggctgccccttccagccctgggacggcctggacgagcactcccaggccctgtccggccggctgcgggccatcctgcagaaccagggcaactccggctccgagacccccggcacctccgagtccgccacccccgagtccgcagcgttcaaaccaaatcccatcaactacatcctgggcctggccatcggcatcgcctccgtgggctgggccatggtggagatcgacgaggaggagaaccccatccggctgatcgacctgggcgtgcgggtgttcgagcgggccgaggtgcccaagaccggcgactccctggccatggcccggcggctggcccggtccgtgcggcggctgacccggcggcgggcccaccggctgctgcgggcccggcggctgctgaagcgggagggcgtgctgcaggccgccgacttcgacgagaacggcctgatcaagtccctgcccaacaccccctggcagctgcgggccgccgccctggaccggaagctgacccccctggagtggtccgccgtgctgctgcacctgatcaagcaccggggctacctgtcccagcggaagaacgagggcgagaccgccgacaaggagctgggcgccctgctgaagggcgtggccaacaacgcccacgccctgcagaccggcgacttccggacccccgccgagctggccctgaacaagttcgagaaggagtccggccacatccggaaccagcggggcgactactcccacaccttctcccggaaggacctgcaggccgagctgatcctgctgttcgagaagcagaaggagttcggcaacccccacgtgtccggcggcctgaaggagggcatcgagaccctgctgatgacccagcggcccgccctgtccggcgacgccgtgcagaagatgctgggccactgcaccttcgagcccgccgagcccaaggccgccaagaacacctacaccgccgagcggttcatctggctgaccaagctgaacaacctgcggatcctggagcagggctccgagcggcccctgaccgacaccgagcgggccaccctgatggacgagccctaccggaagtccaagctgacctacgcccaggcccggaagctgctgggcctggaggacaccgccttcttcaagggcctgcggtacggcaaggacaacgccgaggcctccaccctgatggagatgaaggcctaccacgccatctcccgggccctggagaaggagggcctgaaggacaagaagtcccccctgaacctgtcctccgagctgcaggacgagatcggcaccgccttctccctgttcaagaccgacgaggacatcaccggccggctgaaggaccgggtgcagcccgagatcctggaggccctgctgaagcacatctccttcgacaagttcgtgcagatctccctgaaggccctgcggcggatcgtgcccctgatggagcagggcaagcggtacgacgaggcctgcgccgagatctacggcgaccactacggcaagaagaacaccgaggagaagatctacctgccccccatccccgccgacgagatccggaaccccgtggtgctgcgggccctgtcccaggcccggaaggtgatcaacggcgtggtgcggcggtacggctcccccgcccggatccacatcgagaccgcccgggaggtgggcaagtccttcaaggaccggaaggagatcgagaagcggcaggaggagaaccggaaggaccgggagaaggccgccgccaagttccgggagtacttccccaacttcgtgggcgagcccaagtccaaggacatcctgaagctgcggctgtacgagcagcagcacggcaagtgcctgtactccggcaaggagatcaacctggtgcggctgaacgagaagggctacgtggagatcgaccacgccctgcccttctcccggacctgggacgactccttcaacaacaaggtgctggtgctgggctccgagaaccagaacaagggcaaccagaccccctacgagtacttcaacggcaaggacaactcccgggagtggcaggagttcaaggcccgggtggagacctcccggttcccccggtccaagaagcagcggatcctgctgcagaagttcgacgaggacggcttcaaggagtgcaacctgaacgacacccggtacgtgaaccgcttcctgtgccagttcgtggccgaccacatcctgctgaccggcaagggcaagcggcgggtgttcgcctccaacggccagatcaccaacctgctgcggggcttctggggcctgcggaaggtgcgggccgagaacgaccggcaccacgccctggacgccgtggtggtggcctgctccaccgtggccatgcagcagaagatcacccggttcgtgcggtacaaggagatgaacgccttcgacggcaagaccatcgacaaggagaccggcaaggtgctgcaccagaagacccacttcccccagccctgggagttcttcgcccaggaggtgatgatccgggtgttcggcaagcccgacggcaagcccgagttcgaggaggccgacacccccgagaagctgcggaccctgctggccgagaagctgtcctcccggcccgaggccgtgcacgagtacgtgacccccctgttcgtgtcccgggcccccaaccggaagatgtccggcgcccacaaggacaccctgcggtccgccaagcggttcgtgaagcacaacgagaagatctccgtgaagcgggtgtggctgaccgagatcaagctggccgacctggagaacatggtgaactacaagaacggccgggagatcgagctgtacgaggccctgaaggcccggctggaggcctacggcggcaacgccaagcaggccttcgaccccaaggacaaccccttctacaagaagggcggccagctggtgaaggccgtgcgggtggagaagacccaggagtccggcgtgctgctgaacaagaagaacgcctacaccatcgccgacaacggcgacatggtgcgggtggacgtgttctgcaaggtggacaagaagggcaagaaccagtacttcatcgtgcccatctacgcctggcaggtggccgagaacatcctgcccgacatcgactgcaagggctaccggatcgacgactcctacaccttctgcttctccctgcacaagtacgacctgatcgccttccagaaggacgagaagtccaaggtggagttcgcctactacatcaactgcgactcctccaacggccggttctacctggcctggcacgacaagggctccaaggagcagcagttccggatctccacccagaacctggtgctgatccagaagtaccaggtgaacgagctgggcaaggagatccggccctgccggctgaagaagcggccccccgtgcggtccggaaagcggaccgccgacggctccgagttcgagtcccccaagaagaagcggaaggtggagtagtgactagcaccagcctcaagaacacccgaatggagtctctaagctacataataccaacttacactttacaaaatgttgtcccccaaaatgtagccattcgtatctgctcctaataaaaagaaagtttcttcacattct

SEQ ID NO: 138 - RNA, 4068 nt, synthetic construct
  source 1..4068: mol_type = other RNA
atggacggctccggcggcggctcccccaagaagaagcggaaggtggaggacaagcggcccgccgccaccaagaaggccggccaggccaagaagaagaagggcggctccggcggcggcgaggcctcccccgcctccggcccccggcacctgatggacccccacatcttcacctccaacttcaacaacggcatcggccggcacaagacctacctgtgctacgaggtggagcggctggacaacggcacctccgtgaagatggaccagcaccggggcttcctgcacaaccaggccaagaacctgctgtgcggcttctacggccggcacgccgagctgcggttcctggacctggtgccctccctgcagctggaccccgcccagatctaccgggtgacctggttcatctcctggtccccctgcttctcctggggctgcgccggcgaggtgcgggccttcctgcaggagaacacccacgtgcggctgcggatcttcgccgcccggatctacgactacgaccccctgtacaaggaggccctgcagatgctgcgggacgccggcgcccaggtgtccatcatgacctacgacgagttcaagcactgctgggacaccttcgtggaccaccagggctgccccttccagccctgggacggcctggacgagcactcccaggccctgtccggccggctgcgggccatcctgcagaaccagggcaactccggctccgagacccccggcacctccgagtccgccacccccgagtccgcagcgttcaaaccaaatcccatcaactacatcctgggcctggccatcggcatcgcctccgtgggctgggccatggtggagatcgacgaggaggagaaccccatccggctgatcgacctgggcgtgcgggtgttcgagcgggccgaggtgcccaagaccggcgactccctggccatggcccggcggctggcccggtccgtgcggcggctgacccggcggcgggcccaccggctgctgcgggcccggcggctgctgaagcgggagggcgtgctgcaggccgccgacttcgacgagaacggcctgatcaagtccctgcccaacaccccctggcagctgcgggccgccgccctggaccggaagctgacccccctggagtggtccgccgtgctgctgcacctgatcaagcaccggggctacctgtcccagcggaagaacgagggcgagaccgccgacaaggagctgggcgccctgctgaagggcgtggccaacaacgcccacgccctgcagaccggcgacttccggacccccgccgagctggccctgaacaagttcgagaaggagtccggccacatccggaaccagcggggcgactactcccacaccttctcccggaaggacctgcaggccgagctgatcctgctgttcgagaagcagaaggagttcggcaacccccacgtgtccggcggcctgaaggagggcatcgagaccctgctgatgacccagcggcccgccctgtccggcgacgccgtgcagaagatgctgggccactgcaccttcgagcccgccgagcccaaggccgccaagaacacctacaccgccgagcggttcatctggctgaccaagctgaacaacctgcggatcctggagcagggctccgagcggcccctgaccgacaccgagcgggccaccctgatggacgagccctaccggaagtccaagctgacctacgcccaggcccggaagctgctgggcctggaggacaccgccttcttcaagggcctgcggtacggcaaggacaacgccgaggcctccaccctgatggagatgaaggcctaccacgccatctcccgggccctggagaaggagggcctgaaggacaagaagtcccccctgaacctgtcctccgagctgcaggacgagatcggcaccgccttctccctgttcaagaccgacgaggacatcaccggccggctgaaggaccgggtgcagcccgagatcctggaggccctgctgaagcacatctccttcgacaagttcgtgcagatctccctgaaggccctgcggcggatcgtgcccctgatggagcagggcaagcggtacgacgaggcctgcgccgagatctacggcgaccactacggcaagaagaacaccgaggagaagatctacctgccccccatccccgccgacgagatccggaaccccgtggtgctgcgggccctgtcccaggcccggaaggtgatcaacggcgtggtgcggcggtacggctcccccgcccggatccacatcgagaccgcccgggaggtgggcaagtccttcaaggaccggaaggagatcgagaagcggcaggaggagaaccggaaggaccgggagaaggccgccgccaagttccgggagtacttccccaacttcgtgggcgagcccaagtccaaggacatcctgaagctgcggctgtacgagcagcagcacggcaagtgcctgtactccggcaaggagatcaacctggtgcggctgaacgagaagggctacgtggagatcgaccacgccctgcccttctcccggacctgggacgactccttcaacaacaaggtgctggtgctgggctccgagaaccagaacaagggcaaccagaccccctacgagtacttcaacggcaaggacaactcccgggagtggcaggagttcaaggcccgggtggagacctcccggttcccccggtccaagaagcagcggatcctgctgcagaagttcgacgaggacggcttcaaggagtgcaacctgaacgacacccggtacgtgaaccgcttcctgtgccagttcgtggccgaccacatcctgctgaccggcaagggcaagcggcgggtgttcgcctccaacggccagatcaccaacctgctgcggggcttctggggcctgcggaaggtgcgggccgagaacgaccggcaccacgccctggacgccgtggtggtggcctgctccaccgtggccatgcagcagaagatcacccggttcgtgcggtacaaggagatgaacgccttcgacggcaagaccatcgacaaggagaccggcaaggtgctgcaccagaagacccacttcccccagccctgggagttcttcgcccaggaggtgatgatccgggtgttcggcaagcccgacggcaagcccgagttcgaggaggccgacacccccgagaagctgcggaccctgctggccgagaagctgtcctcccggcccgaggccgtgcacgagtacgtgacccccctgttcgtgtcccgggcccccaaccggaagatgtccggcgcccacaaggacaccctgcggtccgccaagcggttcgtgaagcacaacgagaagatctccgtgaagcgggtgtggctgaccgagatcaagctggccgacctggagaacatggtgaactacaagaacggccgggagatcgagctgtacgaggccctgaaggcccggctggaggcctacggcggcaacgccaagcaggccttcgaccccaaggacaaccccttctacaagaagggcggccagctggtgaaggccgtgcgggtggagaagacccaggagtccggcgtgctgctgaacaagaagaacgcctacaccatcgccgacaacggcgacatggtgcgggtggacgtgttctgcaaggtggacaagaagggcaagaaccagtacttcatcgtgcccatctacgcctggcaggtggccgagaacatcctgcccgacatcgactgcaagggctaccggatcgacgactcctacaccttctgcttctccctgcacaagtacgacctgatcgccttccagaaggacgagaagtccaaggtggagttcgcctactacatcaactgcgactcctccaacggccggttctacctggcctggcacgacaagggctccaaggagcagcagttccggatctccacccagaacctggtgctgatccagaagtaccaggtgaacgagctgggcaaggagatccggccctgccggctgaagaagcggccccccgtgcggtccggaaagcggaccgccgacggctccgagttcgagtcccccaagaagaagcggaaggtggagtag

SEQ ID NO: 139 - protein, 1355 aa, synthetic construct
MDGSGGGSPKKKRKVEDKRPAATKKAGQAKKKKGGSGGGEASPASGPRHLMDPHIFTSNFNNGIGRHKTYLCYEVERLDNGTSVKMDQHRGFLHNQAKNLLCGFYGRHAELRFLDLVPSLQLDPAQIYRVTWFISWSPCFSWGCAGEVRAFLQENTHVRLRIFAARIYDYDPLYKEALQMLRDAGAQVSIMTYDEFKHCWDTFVDHQGCPFQPWDGLDEHSQALSGRLRAILQNQGNSGSETPGTSESATPESAAFKPNPINYILGLAIGIASVGWAMVEIDEEENPIRLIDLGVRVFERAEVPKTGDSLAMARRLARSVRRLTRRRAHRLLRARRLLKREGVLQAADFDENGLIKSLPNTPWQLRAAALDRKLTPLEWSAVLLHLIKHRGYLSQRKNEGETADKELGALLKGVANNAHALQTGDFRTPAELALNKFEKESGHIRNQRGDYSHTFSRKDLQAELILLFEKQKEFGNPHVSGGLKEGIETLLMTQRPALSGDAVQKMLGHCTFEPAEPKAAKNTYTAERFIWLTKLNNLRILEQGSERPLTDTERATLMDEPYRKSKLTYAQARKLLGLEDTAFFKGLRYGKDNAEASTLMEMKAYHAISRALEKEGLKDKKSPLNLSSELQDEIGTAFSLFKTDEDITGRLKDRVQPEILEALLKHISFDKFVQISLKALRRIVPLMEQGKRYDEACAEIYGDHYGKKNTEEKIYLPPIPADEIRNPVVLRALSQARKVINGVVRRYGSPARIHIETAREVGKSFKDRKEIEKRQEENRKDREKAAAKFREYFPNFVGEPKSKDILKLRLYEQQHGKCLYSGKEINLVRLNEKGYVEIDHALPFSRTWDDSFNNKVLVLGSENQNKGNQTPYEYFNGKDNSREWQEFKARVETSRFPRSKKQRILLQKFDEDGFKECNLNDTRYVNRFLCQFVADHILLTGKGKRRVFASNGQITNLLRGFWGLRKVRAENDRHHALDAVVVACSTVAMQQKITRFVRYKEMNAFDGKTIDKETGKVLHQKTHFPQPWEFFAQEVMIRVFGKPDGKPEFEEADTPEKLRTLLAEKLSSRPEAVHEYVTPLFVSRAPNRKMSGAHKDTLRSAKRFVKHNEKISVKRVWLTEIKLADLENMVNYKNGREIELYEALKARLEAYGGNAKQAFDPKDNPFYKKGGQLVKAVRVEKTQESGVLLNKKNAYTIADNGDMVRVDVFCKVDKKGKNQYFIVPIYAWQVAENILPDIDCKGYRIDDSYTFCFSLHKYDLIAFQKDEKSKVEFAYYINCDSSNGRFYLAWHDKGSKEQQFRISTQNLVLIQKYQVNELGKEIRPCRLKKRPPVRSGKRTADGSEFESPKKKRKVE

SEQ ID NO: 140 - RNA, 4368 nt, synthetic construct
  source 1..4368: mol_type = other RNA
gggaagctcagaataaacgctcaactttggccggatctgccaccatggacggctccggcggcggctcccccaagaagaagcggaaggtggaggacaagcggcccgccgccaccaagaaggccggccaggccaagaagaagaagggcggctccggcggcggcgaggcctcccccgcctccggcccccggcacctgatggacccccacatcttcacctccaacttcaacaacggcatcggccggcacaagacctacctgtgctacgaggtggagcggctggacaacggcacctccgtgaagatggaccagcaccggggcttcctgcacaaccaggccaagaacctgctgtgcggcttctacggccggcacgccgagctgcggttcctggacctggtgccctccctgcagctggaccccgcccagatctaccgggtgacctggttcatctcctggtccccctgcttctcctggggctgcgccggcgaggtgcgggccttcctgcaggagaacacccacgtgcggctgcggatcttcgccgcccggatctacgactacgaccccctgtacaaggaggccctgcagatgctgcgggacgccggcgcccaggtgtccatcatgacctacgacgagttcaagcactgctgggacaccttcgtggaccaccagggctgccccttccagccctgggacggcctggacgagcactcccaggccctgtccggccggctgcgggccatcctgcagaaccagggcaactccggctccgagacccccggcacctccgagtccgccacccccgagtccgcagcgttcaaaccaaatcccatcaactacatcctgggcctggccatcggcatcgcctccgtgggctgggccatggtggagatcgacgaggaggagaaccccatccggctgatcgacctgggcgtgcgggtgttcgagcgggccgaggtgcccaagaccggcgactccctggccatggcccggcggctggcccggtccgtgcggcggctgacccggcggcgggcccaccggctgctgcgggcccggcggctgctgaagcgggagggcgtgctgcaggccgccgacttcgacgagaacggcctgatcaagtccctgcccaacaccccctggcagctgcgggccgccgccctggaccggaagctgacccccctggagtggtccgccgtgctgctgcacctgatcaagcaccggggctacctgtcccagcggaagaacgagggcgagaccgccgacaaggagctgggcgccctgctgaagggcgtggccaacaacgcccacgccctgcagaccggcgacttccggacccccgccgagctggccctgaacaagttcgagaaggagtccggccacatccggaaccagcggggcgactactcccacaccttctcccggaaggacctgcaggccgagctgatcctgctgttcgagaagcagaaggagttcggcaacccccacgtgtccggcggcctgaaggagggcatcgagaccctgctgatgacccagcggcccgccctgtccggcgacgccgtgcagaagatgctgggccactgcaccttcgagcccgccgagcccaaggccgccaagaacacctacaccgccgagcggttcatctggctgaccaagctgaacaacctgcggatcctggagcagggctccgagcggcccctgaccgacaccgagcgggccaccctgatggacgagccctaccggaagtccaagctgacctacgcccaggcccggaagctgctgggcctggaggacaccgccttcttcaagggcctgcggtacggcaaggacaacgccgaggcctccaccctgatggagatgaaggcctaccacgccatctcccgggccctggagaaggagggcctgaaggacaagaagtcccccctgaacctgtcctccgagctgcaggacgagatcggcaccgccttctccctgttcaagaccgacgaggacatcaccggccggctgaaggaccgggtgcagcccgagatcctggaggccctgctgaagcacatctccttcgacaagttcgtgcagatctccctgaaggccctgcggcggatcgtgcccctgatggagcagggcaagcggtacgacgaggcctgcgccgagatctacggcgaccactacggcaagaagaacaccgaggagaagatctacctgccccccatccccgccgacgagatccggaaccccgtggtgctgcgggccctgtcccaggcccggaaggtgatcaacggcgtggtgcggcggtacggctcccccgcccggatccacatcgagaccgcccgggaggtgggcaagtccttcaaggaccggaaggagatcgagaagcggcaggaggagaaccggaaggaccgggagaaggccgccgccaagttccgggagtacttccccaacttcgtgggcgagcccaagtccaaggacatcctgaagctgcggctgtacgagcagcagcacggcaagtgcctgtactccggcaaggagatcaacctggtgcggctgaacgagaagggctacgtggagatcgaccacgccctgcccttctcccggacctgggacgactccttcaacaacaaggtgctggtgctgggctccgagaaccagaacaagggcaaccagaccccctacgagtacttcaacggcaaggacaactcccgggagtggcaggagttcaaggcccgggtggagacctcccggttcccccggtccaagaagcagcggatcctgctgcagaagttcgacgaggacggcttcaaggagtgcaacctgaacgacacccggtacgtgaaccgcttcctgtgccagttcgtggccgaccacatcctgctgaccggcaagggcaagcggcgggtgttcgcctccaacggccagatcaccaacctgctgcggggcttctggggcctgcggaaggtgcgggccgagaacgaccggcaccacgccctggacgccgtggtggtggcctgctccaccgtggccatgcagcagaagatcacccggttcgtgcggtacaaggagatgaacgccttcgacggcaagaccatcgacaaggagaccggcaaggtgctgcaccagaagacccacttcccccagccctgggagttcttcgcccaggaggtgatgatccgggtgttcggcaagcccgacggcaagcccgagttcgaggaggccgacacccccgagaagctgcggaccctgctggccgagaagctgtcctcccggcccgaggccgtgcacgagtacgtgacccccctgttcgtgtcccgggcccccaaccggaagatgtccggcgcccacaaggacaccctgcggtccgccaagcggttcgtgaagcacaacgagaagatctccgtgaagcgggtgtggctgaccgagatcaagctggccgacctggagaacatggtgaactacaagaacggccgggagatcgagctgtacgaggccctgaaggcccggctggaggcctacggcggcaacgccaagcaggccttcgaccccaaggacaaccccttctacaagaagggcggccagctggtgaaggccgtgcgggtggagaagacccaggagtccggcgtgctgctgaacaagaagaacgcctacaccatcgccgacaacggcgacatggtgcgggtggacgtgttctgcaaggtggacaagaagggcaagaaccagtacttcatcgtgcccatctacgcctggcaggtggccgagaacatcctgcccgacatcgactgcaagggctaccggatcgacgactcctacaccttctgcttctccctgcacaagtacgacctgatcgccttccagaaggacgagaagtccaaggtggagttcgcctactacatcaactgcgactcctccaacggccggttctacctggcctggcacgacaagggctccaaggagcagcagttccggatctccacccagaacctggtgctgatccagaagtaccaggtgaacgagctgggcaaggagatccggccctgccggctgaagaagcggccccccgtgcgggaggacaagcggcccgccgccaccaagaaggccggccaggccaagaagaagaagtacccctacgacgtgcccgactacgccggctacccctacgacgtgcccgactacgccggctcctacccctacgacgtgcccgactacgccgccgcccccgccgccaagaagaagaagctggactagctagtgactagcaccagcctcaagaacacccgaatggagtctctaagctacataataccaacttacactttacaaaatgttgtcccccaaaatgtagccattcgtatctgctcctaataaaaagaaagtttcttcacattct

SEQ ID NO: 141 - RNA, 4180 nt, synthetic construct
  source 1..4180: mol_type = other RNA
atggacggctccggcggcggctcccccaagaagaagcggaaggtggaggacaagcggcccgccgccaccaagaaggccggccaggccaagaagaagaagggcggctccggcggcggcgaggcctcccccgcctccggcccccggcacctgatggacccccacatcttcacctccaacttcaacaacggcatcggccggcacaagacctacctgtgctacgaggtggagcggctggacaacggcacctccgtgaagatggaccagcaccggggcttcctgcacaaccaggccaagaacctgctgtgcggcttctacggccggcacgccgagctgcggttcctggacctggtgccctccctgcagctggaccccgcccagatctaccgggtgacctggttcatctcctggtccccctgcttctcctggggctgcgccggcgaggtgcgggccttcctgcaggagaacacccacgtgcggctgcggatcttcgccgcccggatctacgactacgaccccctgtacaaggaggccctgcagatgctgcgggacgccggcgcccaggtgtccatcatgacctacgacgagttcaagcactgctgggacaccttcgtggaccaccagggctgccccttccagccctgggacggcctggacgagcactcccaggccctgtccggccggctgcgggccatcctgcagaaccagggcaactccggctccgagacccccggcacctccgagtccgccacccccgagtccgcagcgttcaaaccaaatcccatcaactacatcctgggcctggccatcggcatcgcctccgtgggctgggccatggtggagatcgacgaggaggagaaccccatccggctgatcgacctgggcgtgcgggtgttcgagcgggccgaggtgcccaagaccggcgactccctggccatggcccggcggctggcccggtccgtgcggcggctgacccggcggcgggcccaccggctgctgcgggcccggcggctgctgaagcgggagggcgtgctgcaggccgccgacttcgacgagaacggcctgatcaagtccctgcccaacaccccctggcagctgcgggccgccgccctggaccggaagctgacccccctggagtggtccgccgtgctgctgcacctgatcaagcaccggggctacctgtcccagcggaagaacgagggcgagaccgccgacaaggagctgggcgccctgctgaagggcgtggccaacaacgcccacgccctgcagaccggcgacttccggacccccgccgagctggccctgaacaagttcgagaaggagtccggccacatccggaaccagcggggcgactactcccacaccttctcccggaaggacctgcaggccgagctgatcctgctgttcgagaagcagaaggagttcggcaacccccacgtgtccggcggcctgaaggagggcatcgagaccctgctgatgacccagcggcccgccctgtccggcgacgccgtgcagaagatgctgggccactgcaccttcgagcccgccgagcccaaggccgccaagaacacctacaccgccgagcggttcatctggctgaccaagctgaacaacctgcggatcctggagcagggctccgagcggcccctgaccgacaccgagcgggccaccctgatggacgagccctaccggaagtccaagctgacctacgcccaggcccggaagctgctgggcctggaggacaccgccttcttcaagggcctgcggtacggcaaggacaacgccgaggcctccaccctgatggagatgaaggcctaccacgccatctcccgggccctggagaaggagggcctgaaggacaagaagtcccccctgaacctgtcctccgagctgcaggacgagatcggcaccgccttctccctgttcaagaccgacgaggacatcaccggccggctgaaggaccgggtgcagcccgagatcctggaggccctgctgaagcacatctccttcgacaagttcgtgcagatctccctgaaggccctgcggcggatcgtgcccctgatggagcagggcaagcggtacgacgaggcctgcgccgagatctacggcgaccactacggcaagaagaacaccgaggagaagatctacctgccccccatccccgccgacgagatccggaaccccgtggtgctgcgggccctgtcccaggcccggaaggtgatcaacggcgtggtgcggcggtacggctcccccgcccggatccacatcgagaccgcccgggaggtgggcaagtccttcaaggaccggaaggagatcgagaagcggcaggaggagaaccggaaggaccgggagaaggccgccgccaagttccgggagtacttccccaacttcgtgggcgagcccaagtccaaggacatcctgaagctgcggctgtacgagcagcagcacggcaagtgcctgtactccggcaaggagatcaacctggtgcggctgaacgagaagggctacgtggagatcgaccacgccctgcccttctcccggacctgggacgactccttcaacaacaaggtgctggtgctgggctccgagaaccagaacaagggcaaccagaccccctacgagtacttcaacggcaaggacaactcccgggagtggcaggagttcaaggcccgggtggagacctcccggttcccccggtccaagaagcagcggatcctgctgcagaagttcgacgaggacggcttcaaggagtgcaacctgaacgacacccggtacgtgaaccgcttcctgtgccagttcgtggccgaccacatcctgctgaccggcaagggcaagcggcgggtgttcgcctccaacggccagatcaccaacctgctgcggggcttctggggcctgcggaaggtgcgggccgagaacgaccggcaccacgccctggacgccgtggtggtggcctgctccaccgtggccatgcagcagaagatcacccggttcgtgcggtacaaggagatgaacgccttcgacggcaagaccatcgacaaggagaccggcaaggtgctgcaccagaagacccacttcccccagccctgggagttcttcgcccaggaggtgatgatccgggtgttcggcaagcccgacggcaagcccgagttcgaggaggccgacacccccgagaagctgcggaccctgctggccgagaagctgtcctcccggcccgaggccgtgcacgagtacgtgacccccctgttcgtgtcccgggcccccaaccggaagatgtccggcgcccacaaggacaccctgcggtccgccaagcggttcgtgaagcacaacgagaagatctccgtgaagcgggtgtggctgaccgagatcaagctggccgacctggagaacatggtgaactacaagaacggccgggagatcgagctgtacgaggccctgaaggcccggctggaggcctacggcggcaacgccaagcaggccttcgaccccaaggacaaccccttctacaagaagggcggccagctggtgaaggccgtgcgggtggagaagacccaggagtccggcgtgctgctgaacaagaagaacgcctacaccatcgccgacaacggcgacatggtgcgggtggacgtgttctgcaaggtggacaagaagggcaagaaccagtacttcatcgtgcccatctacgcctggcaggtggccgagaacatcctgcccgacatcgactgcaagggctaccggatcgacgactcctacaccttctgcttctccctgcacaagtacgacctgatcgccttccagaaggacgagaagtccaaggtggagttcgcctactacatcaactgcgactcctccaacggccggttctacctggcctggcacgacaagggctccaaggagcagcagttccggatctccacccagaacctggtgctgatccagaagtaccaggtgaacgagctgggcaaggagatccggccctgccggctgaagaagcggccccccgtgcgggaggacaagcggcccgccgccaccaagaaggccggccaggccaagaagaagaagtacccctacgacgtgcccgactacgccggctacccctacgacgtgcccgactacgccggctcctacccctacgacgtgcccgactacgccgccgcccccgccgccaagaagaagaagctggact

SEQ ID NO: 142 - protein, 1393 aa, synthetic construct
MDGSGGGSPKKKRKVEDKRPAATKKAGQAKKKKGGSGGGEASPASGPRHLMDPHIFTSNFNNGIGRHKTYLCYEVERLDNGTSVKMDQHRGFLHNQAKNLLCGFYGRHAELRFLDLVPSLQLDPAQIYRVTWFISWSPCFSWGCAGEVRAFLQENTHVRLRIFAARIYDYDPLYKEALQMLRDAGAQVSIMTYDEFKHCWDTFVDHQGCPFQPWDGLDEHSQALSGRLRAILQNQGNSGSETPGTSESATPESAAFKPNPINYILGLAIGIASVGWAMVEIDEEENPIRLIDLGVRVFERAEVPKTGDSLAMARRLARSVRRLTRRRAHRLLRARRLLKREGVLQAADFDENGLIKSLPNTPWQLRAAALDRKLTPLEWSAVLLHLIKHRGYLSQRKNEGETADKELGALLKGVANNAHALQTGDFRTPAELALNKFEKESGHIRNQRGDYSHTFSRKDLQAELILLFEKQKEFGNPHVSGGLKEGIETLLMTQRPALSGDAVQKMLGHCTFEPAEPKAAKNTYTAERFIWLTKLNNLRILEQGSERPLTDTERATLMDEPYRKSKLTYAQARKLLGLEDTAFFKGLRYGKDNAEASTLMEMKAYHAISRALEKEGLKDKKSPLNLSSELQDEIGTAFSLFKTDEDITGRLKDRVQPEILEALLKHISFDKFVQISLKALRRIVPLMEQGKRYDEACAEIYGDHYGKKNTEEKIYLPPIPADEIRNPVVLRALSQARKVINGVVRRYGSPARIHIETAREVGKSFKDRKEIEKRQEENRKDREKAAAKFREYFPNFVGEPKSKDILKLRLYEQQHGKCLYSGKEINLVRLNEKGYVEIDHALPFSRTWDDSFNNKVLVLGSENQNKGNQTPYEYFNGKDNSREWQEFKARVETSRFPRSKKQRILLQKFDEDGFKECNLNDTRYVNRFLCQFVADHILLTGKGKRRVFASNGQITNLLRGFWGLRKVRAENDRHHALDAVVVACSTVAMQQKITRFVRYKEMNAFDGKTIDKETGKVLHQKTHFPQPWEFFAQEVMIRVFGKPDGKPEFEEADTPEKLRTLLAEKLSSRPEAVHEYVTPLFVSRAPNRKMSGAHKDTLRSAKRFVKHNEKISVKRVWLTEIKLADLENMVNYKNGREIELYEALKARLEAYGGNAKQAFDPKDNPFYKKGGQLVKAVRVEKTQESGVLLNKKNAYTIADNGDMVRVDVFCKVDKKGKNQYFIVPIYAWQVAENILPDIDCKGYRIDDSYTFCFSLHKYDLIAFQKDEKSKVEFAYYINCDSSNGRFYLAWHDKGSKEQQFRISTQNLVLIQKYQVNELGKEIRPCRLKKRPPVREDKRPAATKKAGQAKKKKYPYDVPDYAGYPYDVPDYAGSYPYDVPDYAAAPAAKKKKLD

SEQ ID NO: 143 - RNA, 4187 nt, synthetic construct
  source 1..4187: mol_type = other RNA
gggaagctcagaataaacgctcaactttggccggatctgccaccatggacggctccggcggcggctcccccaagaagaagcggaaggtggaggacaagcggcccgccgccaccaagaaggccggccaggccaagaagaagaagggcggctccggcggcggcgaggcctcccccgcctccggcccccggcacctgatggacccccacatcttcacctccaacttcaacaacggcatcggccggcacaagacctacctgtgctacgaggtggagcggctggacaacggcacctccgtgaagatggaccagcaccggggcttcctgcacaaccaggccaagaacctgctgtgcggcttctacggccggcacgccgagctgcggttcctggacctggtgccctccctgcagctggaccccgcccagatctaccgggtgacctggttcatctcctggtccccctgcttctcctggggctgcgccggcgaggtgcgggccttcctgcaggagaacacccacgtgcggctgcggatcttcgccgcccggatctacgactacgaccccctgtacaaggaggccctgcagatgctgcgggacgccggcgcccaggtgtccatcatgacctacgacgagttcaagcactgctgggacaccttcgtggaccaccagggctgccccttccagccctgggacggcctggacgagcactcccaggccctgtccggccggctgcgggccatcctgcagaaccagggcaactccggctccgagacccccggcacctccgagtccgccacccccgagtccgcagcgttcaaaccaaatcccatcaactacatcctgggcctggccatcggcatcgcctccgtgggctgggccatggtggagatcgacgaggaggagaaccccatccggctgatcgacctgggcgtgcgggtgttcgagcgggccgaggtgcccaagaccggcgactccctggccatggcccggcggctggcccggtccgtgcggcggctgacccggcggcgggcccaccggctgctgcgggcccggcggctgctgaagcgggagggcgtgctgcaggccgccgacttcgacgagaacggcctgatcaagtccctgcccaacaccccctggcagctgcgggccgccgccctggaccggaagctgacccccctggagtggtccgccgtgctgctgcacctgatcaagcaccggggctacctgtcccagcggaagaacgagggcgagaccgccgacaaggagctgggcgccctgctgaagggcgtggccaacaacgcccacgccctgcagaccggcgacttccggacccccgccgagctggccctgaacaagttcgagaaggagtccggccacatccggaaccagcggggcgactactcccacaccttctcccggaaggacctgcaggccgagctgatcctgctgttcgagaagcagaaggagttcggcaacccccacgtgtccggcggcctgaaggagggcatcgagaccctgctgatgacccagcggcccgccctgtccggcgacgccgtgcagaagatgctgggccactgcaccttcgagcccgccgagcccaaggccgccaagaacacctacaccgccgagcggttcatctggctgaccaagctgaacaacctgcggatcctggagcagggctccgagcggcccctgaccgacaccgagcgggccaccctgatggacgagccctaccggaagtccaagctgacctacgcccaggcccggaagctgctgggcctggaggacaccgccttcttcaagggcctgcggtacggcaaggacaacgccgaggcctccaccctgatggagatgaaggcctaccacgccatctcccgggccctggagaaggagggcctgaaggacaagaagtcccccctgaacctgtcctccgagctgcaggacgagatcggcaccgccttctccctgttcaagaccgacgaggacatcaccggccggctgaaggaccgggtgcagcccgagatcctggaggccctgctgaagcacatctccttcgacaagttcgtgcagatctccctgaaggccctgcggcggatcgtgcccctgatggagcagggcaagcggtacgacgaggcctgcgccgagatctacggcgaccactacggcaagaagaacaccgaggagaagatctacctgccccccatccccgccgacgagatccggaaccccgtggtgctgcgggccctgtcccaggcccggaaggtgatcaacggcgtggtgcggcggtacggctcccccgcccggatccacatcgagaccgcccgggaggtgggcaagtccttcaaggaccggaaggagatcgagaagcggcaggaggagaaccggaaggaccgggagaaggccgccgccaagttccgggagtacttccccaacttcgtgggcgagcccaagtccaaggacatcctgaagctgcggctgtacgagcagcagcacggcaagtgcctgtactccggcaaggagatcaacctggtgcggctgaacgagaagggctacgtggagatcgaccacgccctgcccttctcccggacctgggacgactccttcaacaacaaggtgctggtgctgggctccgagaaccagaacaagggcaaccagaccccctacgagtacttcaacggcaaggacaactcccgggagtggcaggagttcaaggcccgggtggagacctcccggttcccccggtccaagaagcagcggatcctgctgcagaagttcgacgaggacggcttcaaggagtgcaacctgaacgacacccggtacgtgaaccgcttcctgtgccagttcgtggccgaccacatcctgctgaccggcaagggcaagcggcgggtgttcgcctccaacggccagatcaccaacctgctgcggggcttctggggcctgcggaaggtgcgggccgagaacgaccggcaccacgccctggacgccgtggtggtggcctgctccaccgtggccatgcagcagaagatcacccggttcgtgcggtacaaggagatgaacgccttcgacggcaagaccatcgacaaggagaccggcaaggtgctgcaccagaagacccacttcccccagccctgggagttcttcgcccaggaggtgatgatccgggtgttcggcaagcccgacggcaagcccgagttcgaggaggccgacacccccgagaagctgcggaccctgctggccgagaagctgtcctcccggcccgaggccgtgcacgagtacgtgacccccctgttcgtgtcccgggcccccaaccggaagatgtccggcgcccacaaggacaccctgcggtccgccaagcggttcgtgaagcacaacgagaagatctccgtgaagcgggtgtggctgaccgagatcaagctggccgacctggagaacatggtgaactacaagaacggccgggagatcgagctgtacgaggccctgaaggcccggctggaggcctacggcggcaacgccaagcaggccttcgaccccaaggacaaccccttctacaagaagggcggccagctggtgaaggccgtgcgggtggagaagacccaggagtccggcgtgctgctgaacaagaagaacgcctacaccatcgccgacaacggcgacatggtgcgggtggacgtgttctgcaaggtggacaagaagggcaagaaccagtacttcatcgtgcccatctacgcctggcaggtggccgagaacatcctgcccgacatcgactgcaagggctaccggatcgacgactcctacaccttctgcttctccctgcacaagtacgacctgatcgccttccagaaggacgagaagtccaaggtggagttcgcctactacatcaactgcgactcctccaacggccggttctacctggcctggcacgacaagggctccaaggagcagcagttccggatctccacccagaacctggtgctgatccagaagtaccaggtgaacgagctgggcaaggagatccggccctgccggctgaagaagcggccccccgtgcggtagtgactagcaccagcctcaagaacacccgaatggagtctctaagctacataataccaacttacactttacaaaatgttgtcccccaaaatgtagccattcgtatctgctcctaataaaaagaaagtttcttcacattct

SEQ ID NO: 144 - RNA, 4005 nt, synthetic construct
  source 1..4005: mol_type = other RNA
atggacggctccggcggcggctcccccaagaagaagcggaaggtggaggacaagcggcccgccgccaccaagaaggccggccaggccaagaagaagaagggcggctccggcggcggcgaggcctcccccgcctccggcccccggcacctgatggacccccacatcttcacctccaacttcaacaacggcatcggccggcacaagacctacctgtgctacgaggtggagcggctggacaacggcacctccgtgaagatggaccagcaccggggcttcctgcacaaccaggccaagaacctgctgtgcggcttctacggccggcacgccgagctgcggttcctggacctggtgccctccctgcagctggaccccgcccagatctaccgggtgacctggttcatctcctggtccccctgcttctcctggggctgcgccggcgaggtgcgggccttcctgcaggagaacacccacgtgcggctgcggatcttcgccgcccggatctacgactacgaccccctgtacaaggaggccctgcagatgctgcgggacgccggcgcccaggtgtccatcatgacctacgacgagttcaagcactgctgggacaccttcgtggaccaccagggctgccccttccagccctgggacggcctggacgagcactcccaggccctgtccggccggctgcgggccatcctgcagaaccagggcaactccggctccgagacccccggcacctccgagtccgccacccccgagtccgcagcgttcaaaccaaatcccatcaactacatcctgggcctggccatcggcatcgcctccgtgggctgggccatggtggagatcgacgaggaggagaaccccatccggctgatcgacctgggcgtgcgggtgttcgagcgggccgaggtgcccaagaccggcgactccctggccatggcccggcggctggcccggtccgtgcggcggctgacccggcggcgggcccaccggctgctgcgggcccggcggctgctgaagcgggagggcgtgctgcaggccgccgacttcgacgagaacggcctgatcaagtccctgcccaacaccccctggcagctgcgggccgccgccctggaccggaagctgacccccctggagtggtccgccgtgctgctgcacctgatcaagcaccggggctacctgtcccagcggaagaacgagggcgagaccgccgacaaggagctgggcgccctgctgaagggcgtggccaacaacgcccacgccctgcagaccggcgacttccggacccccgccgagctggccctgaacaagttcgagaaggagtccggccacatccggaaccagcggggcgactactcccacaccttctcccggaaggacctgcaggccgagctgatcctgctgttcgagaagcagaaggagttcggcaacccccacgtgtccggcggcctgaaggagggcatcgagaccctgctgatgacccagcggcccgccctgtccggcgacgccgtgcagaagatgctgggccactgcaccttcgagcccgccgagcccaaggccgccaagaacacctacaccgccgagcggttcatctggctgaccaagctgaacaacctgcggatcctggagcagggctccgagcggcccctgaccgacaccgagcgggccaccctgatggacgagccctaccggaagtccaagctgacctacgcccaggcccggaagctgctgggcctggaggacaccgccttcttcaagggcctgcggtacggcaaggacaacgccgaggcctccaccctgatggagatgaaggcctaccacgccatctcccgggccctggagaaggagggcctgaaggacaagaagtcccccctgaacctgtcctccgagctgcaggacgagatcggcaccgccttctccctgttcaagaccgacgaggacatcaccggccggctgaaggaccgggtgcagcccgagatcctggaggccctgctgaagcacatctccttcgacaagttcgtgcagatctccctgaaggccctgcggcggatcgtgcccctgatggagcagggcaagcggtacgacgaggcctgcgccgagatctacggcgaccactacggcaagaagaacaccgaggagaagatctacctgccccccatccccgccgacgagatccggaaccccgtggtgctgcgggccctgtcccaggcccggaaggtgatcaacggcgtggtgcggcggtacggctcccccgcccggatccacatcgagaccgcccgggaggtgggcaagtccttcaaggaccggaaggagatcgagaagcggcaggaggagaaccggaaggaccgggagaaggccgccgccaagttccgggagtacttccccaacttcgtgggcgagcccaagtccaaggacatcctgaagctgcggctgtacgagcagcagcacggcaagtgcctgtactccggcaaggagatcaacctggtgcggctgaacgagaagggctacgtggagatcgaccacgccctgcccttctcccggacctgggacgactccttcaacaacaaggtgctggtgctgggctccgagaaccagaacaagggcaaccagaccccctacgagtacttcaacggcaaggacaactcccgggagtggcaggagttcaaggcccgggtggagacctcccggttcccccggtccaagaagcagcggatcctgctgcagaagttcgacgaggacggcttcaaggagtgcaacctgaacgacacccggtacgtgaaccgcttcctgtgccagttcgtggccgaccacatcctgctgaccggcaagggcaagcggcgggtgttcgcctccaacggccagatcaccaacctgctgcggggcttctggggcctgcggaaggtgcgggccgagaacgaccggcaccacgccctggacgccgtggtggtggcctgctccaccgtggccatgcagcagaagatcacccggttcgtgcggtacaaggagatgaacgccttcgacggcaagaccatcgacaaggagaccggcaaggtgctgcaccagaagacccacttcccccagccctgggagttcttcgcccaggaggtgatgatccgggtgttcggcaagcccgacggcaagcccgagttcgaggaggccgacacccccgagaagctgcggaccctgctggccgagaagctgtcctcccggcccgaggccgtgcacgagtacgtgacccccctgttcgtgtcccgggcccccaaccggaagatgtccggcgcccacaaggacaccctgcggtccgccaagcggttcgtgaagcacaacgagaagatctccgtgaagcgggtgtggctgaccgagatcaagctggccgacctggagaacatggtgaactacaagaacggccgggagatcgagctgtacgaggccctgaaggcccggctggaggcctacggcggcaacgccaagcaggccttcgaccccaaggacaaccccttctacaagaagggcggccagctggtgaaggccgtgcgggtggagaagacccaggagtccggcgtgctgctgaacaagaagaacgcctacaccatcgccgacaacggcgacatggtgcgggtggacgtgttctgcaaggtggacaagaagggcaagaaccagtacttcatcgtgcccatctacgcctggcaggtggccgagaacatcctgcccgacatcgactgcaagggctaccggatcgacgactcctacaccttctgcttctccctgcacaagtacgacctgatcgccttccagaaggacgagaagtccaaggtggagttcgcctactacatcaactgcgactcctccaacggccggttctacctggcctggcacgacaagggctccaaggagcagcagttccggatctccacccagaacctggtgctgatccagaagtaccaggtgaacgagctgggcaaggagatccggccctgccggctgaagaagcggccccccgtgcggtag

SEQ ID NO: 145 - protein, 1334 aa, synthetic construct
MDGSGGGSPKKKRKVEDKRPAATKKAGQAKKKKGGSGGGEASPASGPRHLMDPHIFTSNFNNGIGRHKTYLCYEVERLDNGTSVKMDQHRGFLHNQAKNLLCGFYGRHAELRFLDLVPSLQLDPAQIYRVTWFISWSPCFSWGCAGEVRAFLQENTHVRLRIFAARIYDYDPLYKEALQMLRDAGAQVSIMTYDEFKHCWDTFVDHQGCPFQPWDGLDEHSQALSGRLRAILQNQGNSGSETPGTSESATPESAAFKPNPINYILGLAIGIASVGWAMVEIDEEENPIRLIDLGVRVFERAEVPKTGDSLAMARRLARSVRRLTRRRAHRLLRARRLLKREGVLQAADFDENGLIKSLPNTPWQLRAAALDRKLTPLEWSAVLLHLIKHRGYLSQRKNEGETADKELGALLKGVANNAHALQTGDFRTPAELALNKFEKESGHIRNQRGDYSHTFSRKDLQAELILLFEKQKEFGNPHVSGGLKEGIETLLMTQRPALSGDAVQKMLGHCTFEPAEPKAAKNTYTAERFIWLTKLNNLRILEQGSERPLTDTERATLMDEPYRKSKLTYAQARKLLGLEDTAFFKGLRYGKDNAEASTLMEMKAYHAISRALEKEGLKDKKSPLNLSSELQDEIGTAFSLFKTDEDITGRLKDRVQPEILEALLKHISFDKFVQISLKALRRIVPLMEQGKRYDEACAEIYGDHYGKKNTEEKIYLPPIPADEIRNPVVLRALSQARKVINGVVRRYGSPARIHIETAREVGKSFKDRKEIEKRQEENRKDREKAAAKFREYFPNFVGEPKSKDILKLRLYEQQHGKCLYSGKEINLVRLNEKGYVEIDHALPFSRTWDDSFNNKVLVLGSENQNKGNQTPYEYFNGKDNSREWQEFKARVETSRFPRSKKQRILLQKFDEDGFKECNLNDTRYVNRFLCQFVADHILLTGKGKRRVFASNGQITNLLRGFWGLRKVRAENDRHHALDAVVVACSTVAMQQKITRFVRYKEMNAFDGKTIDKETGKVLHQKTHFPQPWEFFAQEVMIRVFGKPDGKPEFEEADTPEKLRTLLAEKLSSRPEAVHEYVTPLFVSRAPNRKMSGAHKDTLRSAKRFVKHNEKISVKRVWLTEIKLADLENMVNYKNGREIELYEALKARLEAYGGNAKQAFDPKDNPFYKKGGQLVKAVRVEKTQESGVLLNKKNAYTIADNGDMVRVDVFCKVDKKGKNQYFIVPIYAWQVAENILPDIDCKGYRIDDSYTFCFSLHKYDLIAFQKDEKSKVEFAYYINCDSSNGRFYLAWHDKGSKEQQFRISTQNLVLIQKYQVNELGKEIRPCRLKKRPPVR

SEQ ID NO: 146 - protein, 1334 aa, synthetic construct
MDGSGGGSPKKKRKVEDKRPAATKKAGQAKKKKGGSGGGEASPASGPRHLMDPHIFTSNFNNGIGRHKTYLCYEVERLDNGTSVKMDQHRGFLHNQAKNLLCGFYGRHAELRFLDLVPSLQLDPAQIYRVTWFISWSPCFSWGCAGEVRAFLQENTHVRLRIFAARIYDYDPLYKEALQMLRDAGAQVSIMTYDEFKHCWDTFVDHQGCPFQPWDGLDEHSQALSGRLRAILQNQGNGTKDSTKDIPETPSKDAAFKPNPINYILGLAIGIASVGWAMVEIDEEENPIRLIDLGVRVFERAEVPKTGDSLAMARRLARSVRRLTRRRAHRLLRARRLLKREGVLQAADFDENGLIKSLPNTPWQLRAAALDRKLTPLEWSAVLLHLIKHRGYLSQRKNEGETADKELGALLKGVANNAHALQTGDFRTPAELALNKFEKESGHIRNQRGDYSHTFSRKDLQAELILLFEKQKEFGNPHVSGGLKEGIETLLMTQRPALSGDAVQKMLGHCTFEPAEPKAAKNTYTAERFIWLTKLNNLRILEQGSERPLTDTERATLMDEPYRKSKLTYAQARKLLGLEDTAFFKGLRYGKDNAEASTLMEMKAYHAISRALEKEGLKDKKSPLNLSSELQDEIGTAFSLFKTDEDITGRLKDRVQPEILEALLKHISFDKFVQISLKALRRIVPLMEQGKRYDEACAEIYGDHYGKKNTEEKIYLPPIPADEIRNPVVLRALSQARKVINGVVRRYGSPARIHIETAREVGKSFKDRKEIEKRQEENRKDREKAAAKFREYFPNFVGEPKSKDILKLRLYEQQHGKCLYSGKEINLVRLNEKGYVEIDHALPFSRTWDDSFNNKVLVLGSENQNKGNQTPYEYFNGKDNSREWQEFKARVETSRFPRSKKQRILLQKFDEDGFKECNLNDTRYVNRFLCQFVADHILLTGKGKRRVFASNGQITNLLRGFWGLRKVRAENDRHHALDAVVVACSTVAMQQKITRFVRYKEMNAFDGKTIDKETGKVLHQKTHFPQPWEFFAQEVMIRVFGKPDGKPEFEEADTPEKLRTLLAEKLSSRPEAVHEYVTPLFVSRAPNRKMSGAHKDTLRSAKRFVKHNEKISVKRVWLTEIKLADLENMVNYKNGREIELYEALKARLEAYGGNAKQAFDPKDNPFYKKGGQLVKAVRVEKTQESGVLLNKKNAYTIADNGDMVRVDVFCKVDKKGKNQYFIVPIYAWQVAENILPDIDCKGYRIDDSYTFCFSLHKYDLIAFQKDEKSKVEFAYYINCDSSNGRFYLAWHDKGSKEQQFRISTQNLVLIQKYQVNELGKEIRPCRLKKRPPVR

SEQ ID NO: 147 - RNA, 4563 nt, synthetic construct
  source 1..4563: mol_type = other RNA
gggaagctcagaataaacgctcaactttggccggatctgccaccatggacggctccggcggcggctcccccaagaagaagcggaaggtggaggacaagcggcccgccgccaccaagaaggccggccaggccaagaagaagaagggcggctccggcggcggcgaggcctcccccgcctccggcccccggcacctgatggacccccacatcttcacctccaacttcaacaacggcatcggccggcacaagacctacctgtgctacgaggtggagcggctggacaacggcacctccgtgaagatggaccagcaccggggcttcctgcacaaccaggccaagaacctgctgtgcggcttctacggccggcacgccgagctgcggttcctggacctggtgccctccctgcagctggaccccgcccagatctaccgggtgacctggttcatctcctggtccccctgcttctcctggggctgcgccggcgaggtgcgggccttcctgcaggagaacacccacgtgcggctgcggatcttcgccgcccggatctacgactacgaccccctgtacaaggaggccctgcagatgctgcgggacgccggcgcccaggtgtccatcatgacctacgacgagttcaagcactgctgggacaccttcgtggaccaccagggctgccccttccagccctgggacggcctggacgagcactcccaggccctgtccggccggctgcgggccatcctgcagaaccagggcaactccggctccgagacccccggcacctccgagtccgccacccccgagtccgcagcgttcaaaccaaatcccatcaactacatcctgggcctggccatcggcatcgcctccgtgggctgggccatggtggagatcgacgaggaggagaaccccatccggctgatcgacctgggcgtgcgggtgttcgagcgggccgaggtgcccaagaccggcgactccctggccatggcccggcggctggcccggtccgtgcggcggctgacccggcggcgggcccaccggctgctgcgggcccggcggctgctgaagcgggagggcgtgctgcaggccgccgacttcgacgagaacggcctgatcaagtccctgcccaacaccccctggcagctgcgggccgccgccctggaccggaagctgacccccctggagtggtccgccgtgctgctgcacctgatcaagcaccggggctacctgtcccagcggaagaacgagggcgagaccgccgacaaggagctgggcgccctgctgaagggcgtggccaacaacgcccacgccctgcagaccggcgacttccggacccccgccgagctggccctgaacaagttcgagaaggagtccggccacatccggaaccagcggggcgactactcccacaccttctcccggaaggacctgcaggccgagctgatcctgctgttcgagaagcagaaggagttcggcaacccccacgtgtccggcggcctgaaggagggcatcgagaccctgctgatgacccagcggcccgccctgtccggcgacgccgtgcagaagatgctgggccactgcaccttcgagcccgccgagcccaaggccgccaagaacacctacaccgccgagcggttcatctggctgaccaagctgaacaacctgcggatcctggagcagggctccgagcggcccctgaccgacaccgagcgggccaccctgatggacgagccctaccggaagtccaagctgacctacgcccaggcccggaagctgctgggcctggaggacaccgccttcttcaagggcctgcggtacggcaaggacaacgccgaggcctccaccctgatggagatgaaggcctaccacgccatctcccgggccctggagaaggagggcctgaaggacaagaagtcccccctgaacctgtcctccgagctgcaggacgagatcggcaccgccttctccctgttcaagaccgacgaggacatcaccggccggctgaaggaccgggtgcagcccgagatcctggaggccctgctgaagcacatctccttcgacaagttcgtgcagatctccctgaaggccctgcggcggatcgtgcccctgatggagcagggcaagcggtacgacgaggcctgcgccgagatctacggcgaccactacggcaagaagaacaccgaggagaagatctacctgccccccatccccgccgacgagatccggaaccccgtggtgctgcgggccctgtcccaggcccggaaggtgatcaacggcgtggtgcggcggtacggctcccccgcccggatccacatcgagaccgcccgggaggtgggcaagtccttcaaggaccggaaggagatcgagaagcggcaggaggagaaccggaaggaccgggagaaggccgccgccaagttccgggagtacttccccaacttcgtgggcgagcccaagtccaaggacatcctgaagctgcggctgtacgagcagcagcacggcaagtgcctgtactccggcaaggagatcaacctggtgcggctgaacgagaagggctacgtggagatcgaccacgccctgcccttctcccggacctgggacgactccttcaacaacaaggtgctggtgctgggctccgagaaccagaacaagggcaaccagaccccctacgagtacttcaacggcaaggacaactcccgggagtggcaggagttcaaggcccgggtggagacctcccggttcccccggtccaagaagcagcggatcctgctgcagaagttcgacgaggacggcttcaaggagtgcaacctgaacgacacccggtacgtgaaccgcttcctgtgccagttcgtggccgaccacatcctgctgaccggcaagggcaagcggcgggtgttcgcctccaacggccagatcaccaacctgctgcggggcttctggggcctgcggaaggtgcgggccgagaacgaccggcaccacgccctggacgccgtggtggtggcctgctccaccgtggccatgcagcagaagatcacccggttcgtgcggtacaaggagatgaacgccttcgacggcaagaccatcgacaaggagaccggcaaggtgctgcaccagaagacccacttcccccagccctgggagttcttcgcccaggaggtgatgatccgggtgttcggcaagcccgacggcaagcccgagttcgaggaggccgacacccccgagaagctgcggaccctgctggccgagaagctgtcctcccggcccgaggccgtgcacgagtacgtgacccccctgttcgtgtcccgggcccccaaccggaagatgtccggcgcccacaaggacaccctgcggtccgccaagcggttcgtgaagcacaacgagaagatctccgtgaagcgggtgtggctgaccgagatcaagctggccgacctggagaacatggtgaactacaagaacggccgggagatcgagctgtacgaggccctgaaggcccggctggaggcctacggcggcaacgccaagcaggccttcgaccccaaggacaaccccttctacaagaagggcggccagctggtgaaggccgtgcgggtggagaagacccaggagtccggcgtgctgctgaacaagaagaacgcctacaccatcgccgacaacggcgacatggtgcgggtggacgtgttctgcaaggtggacaagaagggcaagaaccagtacttcatcgtgcccatctacgcctggcaggtggccgagaacatcctgcccgacatcgactgcaagggctaccggatcgacgactcctacaccttctgcttctccctgcacaagtacgacctgatcgccttccagaaggacgagaagtccaaggtggagttcgcctactacatcaactgcgactcctccaacggccggttctacctggcctggcacgacaagggctccaaggagcagcagttccggatctccacccagaacctggtgctgatccagaagtaccaggtgaacgagctgggcaaggagatccggccctgccggctgaagaagcggccccccgtgcggtagtgactagcaccagcctcaagaacacccgaatggagtctctaagctacataataccaacttacactttacaaaatgttgtcccccaaaatgtagccattcgtatctgctcctaataaaaagaaagtttcttcacattctctcgagaaaaaaaaaaaatggaaaaaaaaaaaacggaaaaaaaaaaaggtaaaaaaaaaaaatataaaaaaaaaaacataaaaaaaaaaaacgaaaaaaaaaaaacgtaaaaaaaaaaaactcaaaaaaaaaaagataaaaaaaaaaaacctaaaaaaaaaaaatgtaaaaaaaaaaaagggaaaaaaaaaaacgcaaaaaaaaaaaacacaaaaaaaaaaaatgcaaaaaaaaaaaatcgaaaaaaaaaaaatctaaaaaaaaaaaacgaaaaaaaaaaaacccaaaaaaaaaaaagacaaaaaaaaaaaatagaaaaaaaaaaagttaaaaaaaaaaaactgaaaaaaaaaaaatttaaaaaaaaaaaatctag

SEQ ID NO: 148 - protein, 1593 aa, synthetic construct
MEASPASGPRHLMDPHIFTSNFNNGIGRHKTYLCYEVERLDNGTSVKMDQHRGFLHNQAKNLLCGFYGRHAELRFLDLVPSLQLDPAQIYRVTWFISWSPCFSWGCAGEVRAFLQENTHVRLRIFAARIYDYDPLYKEALQMLRDAGAQVSIMTYDEFKHCWDTFVDHQGCPFQPWDGLDEHSQALSGRLRAILQNQGNGTKDSTKDIPETPSKDDKKYSIGLAIGTNSVGWAVITDEYKVPSKKFKVLGNTDRHSIKKNLIGALLFDSGETAEATRLKRTARRRYTRRKNRICYLQEIFSNEMAKVDDSFFHRLEESFLVEEDKKHERHPIFGNIVDEVAYHEKYPTIYHLRKKLVDSTDKADLRLIYLALAHMIKFRGHFLIEGDLNPDNSDVDKLFIQLVQTYNQLFEENPINASGVDAKAILSARLSKSRRLENLIAQLPGEKKNGLFGNLIALSLGLTPNFKSNFDLAEDAKLQLSKDTYDDDLDNLLAQIGDQYADLFLAAKNLSDAILLSDILRVNTEITKAPLSASMIKRYDEHHQDLTLLKALVRQQLPEKYKEIFFDQSKNGYAGYIDGGASQEEFYKFIKPILEKMDGTEELLVKLNREDLLRKQRTFDNGSIPHQIHLGELHAILRRQEDFYPFLKDNREKIEKILTFRIPYYVGPLARGNSRFAWMTRKSEETITPWNFEEVVDKGASAQSFIERMTNFDKNLPNEKVLPKHSLLYEYFTVYNELTKVKYVTEGMRKPAFLSGEQKKAIVDLLFKTNRKVTVKQLKEDYFKKIECFDSVEISGVEDRFNASLGTYHDLLKIIKDKDFLDNEENEDILEDIVLTLTLFEDREMIEERLKTYAHLFDDKVMKQLKRRRYTGWGRLSRKLINGIRDKQSGKTILDFLKSDGFANRNFMQLIHDDSLTFKEDIQKAQVSGQGDSLHEHIANLAGSPAIKKGILQTVKVVDELVKVMGRHKPENIVIEMARENQTTQKGQKNSRERMKRIEEGIKELGSQILKEHPVENTQLQNEKLYLYYLQNGRDMYVDQELDINRLSDYDVDHIVPQSFLKDDSIDNKVLTRSDKNRGKSDNVPSEEVVKKMKNYWRQLLNAKLITQRKFDNLTKAERGGLSELDKAGFIKRQLVETRQITKHVAQILDSRMNTKYDENDKLIREVKVITLKSKLVSDFRKDFQFYKVREINNYHHAHDAYLNAVVGTALIKKYPKLESEFVYGDYKVYDVRKMIAKSEQEIGKATAKYFFYSNIMNFFKTEITLANGEIRKRPLIETNGETGEIVWDKGRDFATVRKVLSMPQVNIVKKTEVQTGGFSKESILPKRNSDKLIARKKDWDPKKYGGFDSPTVAYSVLVVAKVEKGKSKKLKSVKELLGITIMERSSFEKNPIDFLEAKGYKEVKKDLIIKLPKYSLFELENGRKRMLASAGELQKGNELALPSKYVNFLYLASHYEKLKGSPEDNEQKQLFVEQHKHYLDEIIEQISEFSKRVILADANLDKVLSAYNKHRDKPIREQAENIIHLFTLTNLGAPAAFKYFDTTIDRKRYTSTKEVLDATLIHQSITGLYETRIDLSQLGGDGGGSPKKKRKV

SEQ ID NO: 149 - protein, 1082 aa, synthetic construct
MAAFKPNPINYILGLAIGIASVGWAMVEIDEEENPIRLIDLGVRVFERAEVPKTGDSLAMARRLARSVRRLTRRRAHRLLRARRLLKREGVLQAADFDENGLIKSLPNTPWQLRAAALDRKLTPLEWSAVLLHLIKHRGYLSQRKNEGETADKELGALLKGVANNAHALQTGDFRTPAELALNKFEKESGHIRNQRGDYSHTFSRKDLQAELILLFEKQKEFGNPHVSGGLKEGIETLLMTQRPALSGDAVQKMLGHCTFEPAEPKAAKNTYTAERFIWLTKLNNLRILEQGSERPLTDTERATLMDEPYRKSKLTYAQARKLLGLEDTAFFKGLRYGKDNAEASTLMEMKAYHAISRALEKEGLKDKKSPLNLSSELQDEIGTAFSLFKTDEDITGRLKDRVQPEILEALLKHISFDKFVQISLKALRRIVPLMEQGKRYDEACAEIYGDHYGKKNTEEKIYLPPIPADEIRNPVVLRALSQARKVINGVVRRYGSPARIHIETAREVGKSFKDRKEIEKRQEENRKDREKAAAKFREYFPNFVGEPKSKDILKLRLYEQQHGKCLYSGKEINLVRLNEKGYVEIDHALPFSRTWDDSFNNKVLVLGSENQNKGNQTPYEYFNGKDNSREWQEFKARVETSRFPRSKKQRILLQKFDEDGFKECNLNDTRYVNRFLCQFVADHILLTGKGKRRVFASNGQITNLLRGFWGLRKVRAENDRHHALDAVVVACSTVAMQQKITRFVRYKEMNAFDGKTIDKETGKVLHQKTHFPQPWEFFAQEVMIRVFGKPDGKPEFEEADTPEKLRTLLAEKLSSRPEAVHEYVTPLFVSRAPNRKMSGAHKDTLRSAKRFVKHNEKISVKRVWLTEIKLADLENMVNYKNGREIELYEALKARLEAYGGNAKQAFDPKDNPFYKKGGQLVKAVRVEKTQESGVLLNKKNAYTIADNGDMVRVDVFCKVDKKGKNQYFIVPIYAWQVAENILPDIDCKGYRIDDSYTFCFSLHKYDLIAFQKDEKSKVEFAYYINCDSSNGRFYLAWHDKGSKEQQFRISTQNLVLIQKYQVNELGKEIRPCRLKKRPPVR

SEQ ID NO: 150 - DNA, 3243 bp, synthetic construct
  source 1..3243: mol_type = other DNA
gctgcttttaagcctaatcctattaattatattcttggtcttgctattggtattgcttctgttggttgggctatggttgagattgatgaggaggagaatcctattcgtcttattgatcttggtgttcgtgtttttgagcgtgctgaggttcctaagactggtgattctcttgctatggctcgtcgtcttgctcgttctgttcgtcgtcttactcgtcgtcgtgctcatcgtcttcttcgtgctcgtcgtcttcttaagcgtgagggtgttcttcaggctgctgattttgatgagaatggtcttattaagtctcttcctaatactccttggcagcttcgtgctgctgctcttgatcgtaagcttactcctcttgagtggtctgctgttcttcttcatcttattaagcatcgtggttatctttctcagcgtaagaatgagggtgagactgctgataaggagcttggtgctcttcttaagggtgttgctaataatgctcatgctcttcagactggtgattttcgtactcctgctgagcttgctcttaataagtttgagaaggagtctggtcatattcgtaatcagcgtggtgattattctcatactttttctcgtaaggatcttcaggctgagcttattcttctttttgagaagcagaaggagtttggtaatcctcatgtttctggtggtcttaaggagggtattgagactcttcttatgactcagcgtcctgctctttctggtgatgctgttcagaagatgcttggtcattgtacttttgagcctgctgagcctaaggctgctaagaatacttatactgctgagcgttttatttggcttactaagcttaataatcttcgtattcttgagcagggttctgagcgtcctcttactgatactgagcgtgctactcttatggatgagccttatcgtaagtctaagcttacttatgctcaggctcgtaagcttcttggtcttgaggatactgctttttttaagggtcttcgttatggtaaggataatgctgaggcttctactcttatggagatgaaggcttatcatgctatttctcgtgctcttgagaaggagggtcttaaggataagaagtctcctcttaatctttcttctgagcttcaggatgagattggtactgctttttctctttttaagactgatgaggatattactggtcgtcttaaggatcgtgttcagcctgagattcttgaggctcttcttaagcatatttcttttgataagtttgttcagatttctcttaaggctcttcgtcgtattgttcctcttatggagcagggtaagcgttatgatgaggcttgtgctgagatttatggtgatcattatggtaagaagaatactgaggagaagatttatcttcctcctattcctgctgatgagattcgtaatcctgttgttcttcgtgctctttctcaggctcgtaaggttattaatggtgttgttcgtcgttatggttctcctgctcgtattcatattgagactgctcgtgaggttggtaagtcttttaaggatcgtaaggagattgagaagcgtcaggaggagaatcgtaaggatcgtgagaaggctgctgctaagtttcgtgagtattttcctaattttgttggtgagcctaagtctaaggatattcttaagcttcgtctttatgagcagcagcatggtaagtgtctttattctggtaaggagattaatcttgttcgtcttaatgagaagggttatgttgagattgatcatgctcttcctttttctcgtacttgggatgattcttttaataataaggttcttgttcttggttctgagaatcagaataagggtaatcagactccttatgagtattttaatggtaaggataattctcgtgagtggcaggagtttaaggctcgtgttgagacttctcgttttcctcgttctaagaagcagcgtattcttcttcagaagtttgatgaggatggttttaaggagtgtaatcttaatgatactcgttatgttaatcgttttctttgtcagtttgttgctgatcatattcttcttactggtaagggtaagcgtcgtgtttttgcttctaatggtcagattactaatcttcttcgtggtttttggggtcttcgtaaggttcgtgctgagaatgatcgtcatcatgctcttgatgctgttgttgttgcttgttctactgttgctatgcagcagaagattactcgttttgttcgttataaggagatgaatgcttttgatggtaagactattgataaggagactggtaaggttcttcatcagaagactcattttcctcagccttgggagttttttgctcaggaggttatgattcgtgtttttggtaagcctgatggtaagcctgagtttgaggaggctgatactcctgagaagcttcgtactcttcttgctgagaagctttcttctcgtcctgaggctgttcatgagtatgttactcctctttttgtttctcgtgctcctaatcgtaagatgtctggtgctcataaggatactcttcgttctgctaagcgttttgttaagcataatgagaagatttctgttaagcgtgtttggcttactgagattaagcttgctgatcttgagaatatggttaattataagaatggtcgtgagattgagctttatgaggctcttaaggctcgtcttgaggcttatggtggtaatgctaagcaggcttttgatcctaaggataatcctttttataagaagggtggtcagcttgttaaggctgttcgtgttgagaagactcaggagtctggtgttcttcttaataagaagaatgcttatactattgctgataatggtgatatggttcgtgttgatgttttttgtaaggttgataagaagggtaagaatcagtattttattgttcctatttatgcttggcaggttgctgagaatattcttcctgatattgattgtaagggttatcgtattgatgattcttatactttttgtttttctcttcataagtatgatcttattgcttttcagaaggatgagaagtctaaggttgagtttgcttattatattaattgtgattcttctaatggtcgtttttatcttgcttggcatgataagggttctaaggagcagcagtttcgtatttctactcagaatcttgttcttattcagaagtatcaggttaatgagcttggtaaggagattcgtccttgtcgtcttaagaagcgtcctcctgttcgt

SEQ ID NO: 151 - DNA, 3243 bp, synthetic construct
  source 1..3243: mol_type = other DNA
gccgccttcaagcccaaccccatcaactacatcctgggcctggccatcggcatcgcctccgtgggctgggccatggtggagatcgacgaggaggagaaccccatccggctgatcgacctgggcgtgcgggtgttcgagcgggccgaggtgcccaagaccggcgactccctggccatggcccggcggctggcccggtccgtgcggcggctgacccggcggcgggcccaccggctgctgcgggcccggcggctgctgaagcgggagggcgtgctgcaggccgccgacttcgacgagaacggcctgatcaagtccctgcccaacaccccctggcagctgcgggccgccgccctggaccggaagctgacccccctggagtggtccgccgtgctgctgcacctgatcaagcaccggggctacctgtcccagcggaagaacgagggcgagaccgccgacaaggagctgggcgccctgctgaagggcgtggccaacaacgcccacgccctgcagaccggcgacttccggacccccgccgagctggccctgaacaagttcgagaaggagtccggccacatccggaaccagcggggcgactactcccacaccttctcccggaaggacctgcaggccgagctgatcctgctgttcgagaagcagaaggagttcggcaacccccacgtgtccggcggcctgaaggagggcatcgagaccctgctgatgacccagcggcccgccctgtccggcgacgccgtgcagaagatgctgggccactgcaccttcgagcccgccgagcccaaggccgccaagaacacctacaccgccgagcggttcatctggctgaccaagctgaacaacctgcggatcctggagcagggctccgagcggcccctgaccgacaccgagcgggccaccctgatggacgagccctaccggaagtccaagctgacctacgcccaggcccggaagctgctgggcctggaggacaccgccttcttcaagggcctgcggtacggcaaggacaacgccgaggcctccaccctgatggagatgaaggcctaccacgccatctcccgggccctggagaaggagggcctgaaggacaagaagtcccccctgaacctgtcctccgagctgcaggacgagatcggcaccgccttctccctgttcaagaccgacgaggacatcaccggccggctgaaggaccgggtgcagcccgagatcctggaggccctgctgaagcacatctccttcgacaagttcgtgcagatctccctgaaggccctgcggcggatcgtgcccctgatggagcagggcaagcggtacgacgaggcctgcgccgagatctacggcgaccactacggcaagaagaacaccgaggagaagatctacctgccccccatccccgccgacgagatccggaaccccgtggtgctgcgggccctgtcccaggcccggaaggtgatcaacggcgtggtgcggcggtacggctcccccgcccggatccacatcgagaccgcccgggaggtgggcaagtccttcaaggaccggaaggagatcgagaagcggcaggaggagaaccggaaggaccgggagaaggccgccgccaagttccgggagtacttccccaacttcgtgggcgagcccaagtccaaggacatcctgaagctgcggctgtacgagcagcagcacggcaagtgcctgtactccggcaaggagatcaacctggtgcggctgaacgagaagggctacgtggagatcgaccacgccctgcccttctcccggacctgggacgactccttcaacaacaaggtgctggtgctgggctccgagaaccagaacaagggcaaccagaccccctacgagtacttcaacggcaaggacaactcccgggagtggcaggagttcaaggcccgggtggagacctcccggttcccccggtccaagaagcagcggatcctgctgcagaagttcgacgaggacggcttcaaggagtgcaacctgaacgacacccggtacgtgaaccggttcctgtgccagttcgtggccgaccacatcctgctgaccggcaagggcaagcggcgggtgttcgcctccaacggccagatcaccaacctgctgcggggcttctggggcctgcggaaggtgcgggccgagaacgaccggcaccacgccctggacgccgtggtggtggcctgctccaccgtggccatgcagcagaagatcacccggttcgtgcggtacaaggagatgaacgccttcgacggcaagaccatcgacaaggagaccggcaaggtgctgcaccagaagacccacttcccccagccctgggagttcttcgcccaggaggtgatgatccgggtgttcggcaagcccgacggcaagcccgagttcgaggaggccgacacccccgagaagctgcggaccctgctggccgagaagctgtcctcccggcccgaggccgtgcacgagtacgtgacccccctgttcgtgtcccgggcccccaaccggaagatgtccggcgcccacaaggacaccctgcggtccgccaagcggttcgtgaagcacaacgagaagatctccgtgaagcgggtgtggctgaccgagatcaagctggccgacctggagaacatggtgaactacaagaacggccgggagatcgagctgtacgaggccctgaaggcccggctggaggcctacggcggcaacgccaagcaggccttcgaccccaaggacaaccccttctacaagaagggcggccagctggtgaaggccgtgcgggtggagaagacccaggagtccggcgtgctgctgaacaagaagaacgcctacaccatcgccgacaacggcgacatggtgcgggtggacgtgttctgcaaggtggacaagaagggcaagaaccagtacttcatcgtgcccatctacgcctggcaggtggccgagaacatcctgcccgacatcgactgcaagggctaccggatcgacgactcctacaccttctgcttctccctgcacaagtacgacctgatcgccttccagaaggacgagaagtccaaggtggagttcgcctactacatcaactgcgactcctccaacggccggttctacctggcctggcacgacaagggctccaaggagcagcagttccggatctccacccagaacctggtgctgatccagaagtaccaggtgaacgagctgggcaaggagatccggccctgccggctgaagaagcggccccccgtgcgg

SEQ ID NO: 152 - DNA, 3243 bp, synthetic construct; identical to SEQ ID NO: 151
  source 1..3243: mol_type = other DNA

SEQ ID NO: 153 - DNA, 3249 bp, synthetic construct
  source 1..3249: mol_type = other DNA
  modified_base 3247: mod_base = OTHER; note = uracil
atggctgcttttaagcctaatcctattaattatattcttggtcttgctattggtattgcttctgttggttgggctatggttgagattgatgaggaggagaatcctattcgtcttattgatcttggtgttcgtgtttttgagcgtgctgaggttcctaagactggtgattctcttgctatggctcgtcgtcttgctcgttctgttcgtcgtcttactcgtcgtcgtgctcatcgtcttcttcgtgctcgtcgtcttcttaagcgtgagggtgttcttcaggctgctgattttgatgagaatggtcttattaagtctcttcctaatactccttggcagcttcgtgctgctgctcttgatcgtaagcttactcctcttgagtggtctgctgttcttcttcatcttattaagcatcgtggttatctttctcagcgtaagaatgagggtgagactgctgataaggagcttggtgctcttcttaagggtgttgctaataatgctcatgctcttcagactggtgattttcgtactcctgctgagcttgctcttaataagtttgagaaggagtctggtcatattcgtaatcagcgtggtgattattctcatactttttctcgtaaggatcttcaggctgagcttattcttctttttgagaagcagaaggagtttggtaatcctcatgtttctggtggtcttaaggagggtattgagactcttcttatgactcagcgtcctgctctttctggtgatgctgttcagaagatgcttggtcattgtacttttgagcctgctgagcctaaggctgctaagaatacttatactgctgagcgttttatttggcttactaagcttaataatcttcgtattcttgagcagggttctgagcgtcctcttactgatactgagcgtgctactcttatggatgagccttatcgtaagtctaagcttacttatgctcaggctcgtaagcttcttggtcttgaggatactgctttttttaagggtcttcgttatggtaaggataatgctgaggcttctactcttatggagatgaaggcttatcatgctatttctcgtgctcttgagaaggagggtcttaaggataagaagtctcctcttaatctttcttctgagcttcaggatgagattggtactgctttttctctttttaagactgatgaggatattactggtcgtcttaaggatcgtgttcagcctgagattcttgaggctcttcttaagcatatttcttttgataagtttgttcagatttctcttaaggctcttcgtcgtattgttcctcttatggagcagggtaagcgttatgatgaggcttgtgctgagatttatggtgatcattatggtaagaagaatactgaggagaagatttatcttcctcctattcctgctgatgagattcgtaatcctgttgttcttcgtgctctttctcaggctcgtaaggttattaatggtgttgttcgtcgttatggttctcctgctcgtattcatattgagactgctcgtgaggttggtaagtcttttaaggatcgtaaggagattgagaagcgtcaggaggagaatcgtaaggatcgtgagaaggctgctgctaagtttcgtgagtattttcctaattttgttggtgagcctaagtctaaggatattcttaagcttcgtctttatgagcagcagcatggtaagtgtctttattctggtaaggagattaatcttgttcgtcttaatgagaagggttatgttgagattgatcatgctcttcctttttctcgtacttgggatgattcttttaataataaggttcttgttcttggttctgagaatcagaataagggtaatcagactccttatgagtattttaatggtaaggataattctcgtgagtggcaggagtttaaggctcgtgttgagacttctcgttttcctcgttctaagaagcagcgtattcttcttcagaagtttgatgaggatggttttaaggagtgtaatcttaatgatactcgttatgttaatcgttttctttgtcagtttgttgctgatcatattcttcttactggtaagggtaagcgtcgtgtttttgcttctaatggtcagattactaatcttcttcgtggtttttggggtcttcgtaaggttcgtgctgagaatgatcgtcatcatgctcttgatgctgttgttgttgcttgttctactgttgctatgcagcagaagattactcgttttgttcgttataaggagatgaatgcttttgatggtaagactattgataaggagactggtaaggttcttcatcagaagactcattttcctcagccttgggagttttttgctcaggaggttatgattcgtgtttttggtaagcctgatggtaagcctgagtttgaggaggctgatactcctgagaagcttcgtactcttcttgctgagaagctttcttctcgtcctgaggctgttcatgagtatgttactcctctttttgtttctcgtgctcctaatcgtaagatgtctggtgctcataaggatactcttcgttctgctaagcgttttgttaagcataatgagaagatttctgttaagcgtgtttggcttactgagattaagcttgctgatcttgagaatatggttaattataagaatggtcgtgagattgagctttatgaggctcttaaggctcgtcttgaggcttatggtggtaatgctaagcaggcttttgatcctaaggataatcctttttataagaagggtggtcagcttgttaaggctgttcgtgttgagaagactcaggagtctggtgttcttcttaataagaagaatgcttatactattgctgataatggtgatatggttcgtgttgatgttttttgtaaggttgataagaagggtaagaatcagtattttattgttcctatttatgcttggcaggttgctgagaatattcttcctgatattgattgtaagggttatcgtattgatgattcttatactttttgtttttctcttcataagtatgatcttattgcttttcagaaggatgagaagtctaaggttgagtttgcttattatattaattgtgattcttctaatggtcgtttttatcttgcttggcatgataagggttctaaggagcagcagtttcgtatttctactcagaatcttgttcttattcagaagtatcaggttaatgagcttggtaaggagattcgtccttgtcgtcttaagaagcgtcctcctgttcgttga

SEQ ID NO: 154 - DNA, 3249 bp, synthetic construct
  source 1..3249: mol_type = other DNA
  modified_base 3247: mod_base = OTHER; note = uracil
atggccgccttcaagcccaaccccatcaactacatcctgggcctggccatcggcatcgcctccgtgggctgggccatggtggagatcgacgaggaggagaaccccatccggctgatcgacctgggcgtgcgggtgttcgagcgggccgaggtgcccaagaccggcgactccctggccatggcccggcggctggcccggtccgtgcggcggctgacccggcggcgggcccaccggctgctgcgggcccggcggctgctgaagcgggagggcgtgctgcaggccgccgacttcgacgagaacggcctgatcaagtccctgcccaacaccccctggcagctgcgggccgccgccctggaccggaagctgacccccctggagtggtccgccgtgctgctgcacctgatcaagcaccggggctacctgtcccagcggaagaacgagggcgagaccgccgacaaggagctgggcgccctgctgaagggcgtggccaacaacgcccacgccctgcagaccggcgacttccggacccccgccgagctggccctgaacaagttcgagaaggagtccggccacatccggaaccagcggggcgactactcccacaccttctcccggaaggacctgcaggccgagctgatcctgctgttcgagaagcagaaggagttcggcaacccccacgtgtccggcggcctgaaggagggcatcgagaccctgctgatgacccagcggcccgccctgtccggcgacgccgtgcagaagatgctgggccactgcaccttcgagcccgccgagcccaaggccgccaagaacacctacaccgccgagcggttcatctggctgaccaagctgaacaacctgcggatcctggagcagggctccgagcggcccctgaccgacaccgagcgggccaccctgatggacgagccctaccggaagtccaagctgacctacgcccaggcccggaagctgctgggcctggaggacaccgccttcttcaagggcctgcggtacggcaaggacaacgccgaggcctccaccctgatggagatgaaggcctaccacgccatctcccgggccctggagaaggagggcctgaaggacaagaagtcccccctgaacctgtcctccgagctgcaggacgagatcggcaccgccttctccctgttcaagaccgacgaggacatcaccggccggctgaaggaccgggtgcagcccgagatcctggaggccctgctgaagcacatctccttcgacaagttcgtgcagatctccctgaaggccctgcggcggatcgtgcccctgatggagcagggcaagcggtacgacgaggcctgcgccgagatctacggcgaccactacggcaagaagaacaccgaggagaagatctacctgccccccatccccgccgacgagatccggaaccccgtggtgctgcgggccctgtcccaggcccggaaggtgatcaacggcgtggtgcggcggtacggctcccccgcccggatccacatcgagaccgcccgggaggtgggcaagtccttcaaggaccggaaggagatcgagaagcggcaggaggagaaccggaaggaccgggagaaggccgccgccaagttccgggagtacttccccaacttcgtgggcgagcccaagtccaaggacatcctgaagctgcggctgtacgagcagcagcacggcaagtgcctgtactccggcaaggagatcaacctggtgcggctgaacgagaagggctacgtggagatcgaccacgccctgcccttctcccggacctgggacgactccttcaacaacaaggtgctggtgctgggctccgagaaccagaacaagggcaaccagaccccctacgagtacttcaacggcaaggacaactcccgggagtggcaggagttcaaggcccgggtggagacctcccggttcccccggtccaagaagcagcggatcctgctgcagaagttcgacgaggacggcttcaaggagtgcaacctgaacgacacccggtacgtgaaccggttcctgtgccagttcgtggccgaccacatcctgctgaccggcaagggcaagcggcgggtgttcgcctccaacggccagatcaccaacctgctgcggggcttctggggcctgcggaaggtgcgggccgagaacgaccggcaccacgccctggacgccgtggtggtggcctgctccaccgtggccatgcagcagaagatcacccggttcgtgcggtacaaggagatgaacgccttcgacggcaagaccatcgacaaggagaccggcaaggtgctgcaccagaagacccacttcccccagccctgggagttcttcgcccaggaggtgatgatccgggtgttcggcaagcccgacggcaagcccgagttcgaggaggccgacacccccgagaagctgcggaccctgctggccgagaagctgtcctcccggcccgaggccgtgcacgagtacgtgacccccctgttcgtgtcccgggcccccaaccggaagatgtccggcgcccacaaggacaccctgcggtccgccaagcggttcgtgaagcacaacgagaagatctccgtgaagcgggtgtggctgaccgagatcaagctggccgacctggagaacatggtgaactacaagaacggccgggagatcgagctgtacgaggccctgaaggcccggctggaggcctacggcggcaacgccaagcaggccttcgaccccaaggacaaccccttctacaagaagggcggccagctggtgaaggccgtgcgggtggagaagacccaggagtccggcgtgctgctgaacaagaagaacgcctacaccatcgccgacaacggcgacatggtgcgggtggacgtgttctgcaaggtggacaagaagggcaagaaccagtacttcatcgtgcccatctacgcctggcaggtggccgagaacatcctgcccgacatcgactgcaagggctaccggatcgacgactcctacaccttctgcttctccctgcacaagtacgacctgatcgccttccagaaggacgagaagtccaaggtggagttcgcctactacatcaactgcgactcctccaacggccggttctacctggcctggcacgacaagggctccaaggagcagcagttccggatctccacccagaacctggtgctgatccagaagtaccaggtgaacgagctgggcaaggagatccggccctgccggctgaagaagcggccccccgtgcggtga

SEQ ID NO: 155 - DNA, 3249 bp, synthetic construct
  source 1..3249: mol_type = other DNA
  modified_base 3247: mod_base = OTHER; note = uracil
atggccgccttcaagcccaaccccatcaactacatcctgggcctggccatcggcatcgcctccgtgggctgggccatggtggagatcgacgaggaggagaaccccatccggctgatcgacctgggcgtgcgggtgttcgagcgggccgaggtgcccaagaccggcgactccctggccatggcccggcggctggcccggtccgtgcggcggctgacccggcggcgggcccaccggctgctgcgggcccggcggctgctgaagcgggagggcgtgctgcaggccgccgacttcgacgagaacggcctgatcaagtccctgcccaacaccccctggcagctgcgggccgccgccctggaccggaagctgacccccctggagtggtccgccgtgctgctgcacctgatcaagcaccggggctacctgtcccagcggaagaacgagggcgagaccgccgacaaggagctgggcgccctgctgaagggcgtggccaacaacgcccacgccctgcagaccggcgacttccggacccccgccgagctggccctgaacaagttcgagaaggagtccggccacatccggaaccagcggggcgactactcccacaccttctcccggaaggacctgcaggccgagctgatcctgctgttcgagaagcagaaggagttcggcaacccccacgtgtccggcggcctgaaggagggcatcgagaccctgctgatgacccagcggcccgccctgtccggcgacgccgtgcagaagatgctgggccactgcaccttcgagcccgccgagcccaaggccgccaagaacacctacaccgccgagcggttcatctggctgaccaagctgaacaacctgcggatcctggagcagggctccgagcggcccctgaccgacaccgagcgggccaccctgatggacgagccctaccggaagtccaagctgacctacgcccaggcccggaagctgctgggcctggaggacaccgccttcttcaagggcctgcggtacggcaaggacaacgccgaggcctccaccctgatggagatgaaggcctaccacgccatctcccgggccctggagaaggagggcctgaaggacaagaagtcccccctgaacctgtcctccgagctgcaggacgagatcggcaccgccttctccctgttcaagaccgacgaggacatcaccggccggctgaaggaccgggtgcagcccgagatcctggaggccctgctgaagcacatctccttcgacaagttcgtgcagatctccctgaaggccctgcggcggatcgtgcccctgatggagcagggcaagcggtacgacgaggcctgcgccgagatctacggcgaccactacggcaagaagaacaccgaggagaagatctacctgccccccatccccgccgacgagatccggaaccccgtggtgctgcgggccctgtcccaggcccggaaggtgatcaacggcgtggtgcggcggtacggctcccccgcccggatccacatcgagaccgcccgggaggtgggcaagtccttcaaggaccggaaggagatcgagaagcggcaggaggagaaccggaaggaccgggagaaggccgccgccaagttccgggagtacttccccaacttcgtgggcgagcccaagtccaaggacatcctgaagctgcggctgtacgagcagcagcacggcaagtgcctgtactccggcaaggagatcaacctggtgcggctgaacgagaagggctacgtggagatcgaccacgccctgcccttctcccggacctgggacgactccttcaacaacaaggtgctggtgctgggctccgagaaccagaacaagggcaaccagaccccctacgagtacttcaacggcaaggacaactcccgggagtggcaggagttcaaggcccgggtggagacctcccggttcccccggtccaagaagcagcggatcctgctgcagaagttcgacgaggacggcttcaaggagtgcaacctgaacgacacccggtacgtgaaccggttcctgtgccagttcgtggccgaccacatcctgctgaccggcaagggcaagcggcgggtgttcgcctccaacggccagatcaccaacctgctgcggggcttctggggcctgcggaaggtgcgggccgagaacgaccggcaccacgccctggacgccgtggtggtggcctgctccaccgtggccatgcagcagaagatcacccggttcgtgcggtacaaggagatgaacgccttcgacggcaagaccatcgacaaggagaccggcaaggtgctgcaccagaagacccacttcccccagccctgggagttcttcgcccaggaggtgatgatccgggtgttcggcaagcccgacggcaagcccgagttcgaggaggccgacacccccgagaagctgcggaccctgctggccgagaagctgtcctcccggcccgaggccgtgcacgagtacgtgacccccctgttcgtgtcccgggcccccaaccggaagatgtccggcgcccacaaggacaccctgcggtccgccaagcggttcgtgaagcacaacgagaagatctccgtgaagcgggtgtggctgaccgagatcaagctggccgacctggagaacatggtgaactacaagaacggccgggagatcgagctgtacgaggccctgaaggcccggctggaggcctacggcggcaacgccaagcaggccttcgaccccaaggacaaccccttctacaagaagggcggccagctggtgaaggccgtgcgggtggagaagacccaggagtccggcgtgctgctgaacaagaagaacgcctacaccatcgccgacaacggcgacatggtgcgggtggacgtgttctgcaaggtggacaagaagggcaagaaccagtacttcatcgtgcccatctacgcctggcaggtggccgagaacatcctgcccgacatcgactgcaagggctaccggatcgacgactcctacaccttctgcttctccctgcacaagtacgacctgatcgccttccagaaggacgagaagtccaaggtggagttcgcctactacatcaactgcgactcctccaacggccggttctacctggcctggcacgacaagggctccaaggagcagcagttccggatctccacccagaacctggtgctgatccagaagtaccaggtgaacgagctgggcaaggagatccggccctgccggctgaagaagcggccccccgtgcggtaa

SEQ ID NO: 156 - protein, 1379 aa, synthetic construct
MDKKYSIGLDIGTNSVGWAVITDEYKVPSKKFKVLGNTDRHSIKKNLIGALLFDSGETAEATRLKRTARRRYTRRKNRICYLQEIFSNEMAKVDDSFFHRLEESFLVEEDKKHERHPIFGNIVDEVAYHEKYPTIYHLRKKLVDSTDKADLRLIYLALAHMIKFRGHFLIEGDLNPDNSDVDKLFIQLVQTYNQLFEENPINASGVDAKAILSARLSKSRRLENLIAQLPGEKKNGLFGNLIALSLGLTPNFKSNFDLAEDAKLQLSKDTYDDDLDNLLAQIGDQYADLFLAAKNLSDAILLSDILRVNTEITKAPLSASMIKRYDEHHQDLTLLKALVRQQLPEKYKEIFFDQSKNGYAGYIDGGASQEEFYKFIKPILEKMDGTEELLVKLNREDLLRKQRTFDNGSIPHQIHLGELHAILRRQEDFYPFLKDNREKIEKILTFRIPYYVGPLARGNSRFAWMTRKSEETITPWNFEEVVDKGASAQSFIERMTNFDKNLPNEKVLPKHSLLYEYFTVYNELTKVKYVTEGMRKPAFLSGEQKKAIVDLLFKTNRKVTVKQLKEDYFKKIECFDSVEISGVEDRFNASLGTYHDLLKIIKDKDFLDNEENEDILEDIVLTLTLFEDREMIEERLKTYAHLFDDKVMKQLKRRRYTGWGRLSRKLINGIRDKQSGKTILDFLKSDGFANRNFMQLIHDDSLTFKEDIQKAQVSGQGDSLHEHIANLAGSPAIKKGILQTVKVVDELVKVMGRHKPENIVIEMARENQTTQKGQKNSRERMKRIEEGIKELGSQILKEHPVENTQLQNEKLYLYYLQNGRDMYVDQELDINRLSDYDVDHIVPQSFLKDDSIDNKVLTRSDKNRGKSDNVPSEEVVKKMKNYWRQLLNAKLITQRKFDNLTKAERGGLSELDKAGFIKRQLVETRQITKHVAQILDSRMNTKYDENDKLIREVKVITLKSKLVSDFRKDFQFYKVREINNYHHAHDAYLNAVVGTALIKKYPKLESEFVYGDYKVYDVRKMIAKSEQEIGKATAKYFFYSNIMNFFKTEITLANGEIRKRPLIETNGETGEIVWDKGRDFATVRKVLSMPQVNIVKKTEVQTGGFSKESILPKRNSDKLIARKKDWDPKKYGGFDSPTVAYSVLVVAKVEKGKSKKLKSVKELLGITIMERSSFEKNPIDFLEAKGYKEVKKDLIIKLPKYSLFELENGRKRMLASAGELQKGNELALPSKYVNFLYLASHYEKLKGSPEDNEQKQLFVEQHKHYLDEIIEQISEFSKRVILADANLDKVLSAYNKHRDKPIREQAENIIHLFTLTNLGAPAAFKYFDTTIDRKRYTSTKEVLDATLIHQSITGLYETRIDLSQLGGDGGGSPKKKRKV

SEQ ID NO: 157 - protein, 1105 aa, synthetic construct
MTGAAFKPNPINYILGLDIGIASVGWAMVEIDEEENPIRLIDLGVRVFERAEVPKTGDSLAMARRLARSVRRLTRRRAHRLLRARRLLKREGVLQAADFDENGLIKSLPNTPWQLRAAALDRKLTPLEWSAVLLHLIKHRGYLSQRKNEGETADKELGALLKGVANNAHALQTGDFRTPAELALNKFEKESGHIRNQRGDYSHTFSRKDLQAELILLFEKQKEFGNPHVSGGLKEGIETLLMTQRPALSGDAVQKMLGHCTFEPAEPKAAKNTYTAERFIWLTKLNNLRILEQGSERPLTDTERATLMDEPYRKSKLTYAQARKLLGLEDTAFFKGLRYGKDNAEASTLMEMKAYHAISRALEKEGLKDKKSPLNLSSELQDEIGTAFSLFKTDEDITGRLKDRVQPEILEALLKHISFDKFVQISLKALRRIVPLMEQGKRYDEACAEIYGDHYGKKNTEEKIYLPPIPADEIRNPVVLRALSQARKVINGVVRRYGSPARIHIETAREVGKSFKDRKEIEKRQEENRKDREKAAAKFREYFPNFVGEPKSKDILKLRLYEQQHGKCLYSGKEINLVRLNEKGYVEIDHALPFSRTWDDSFNNKVLVLGSENQNKGNQTPYEYFNGKDNSREWQEFKARVETSRFPRSKKQRILLQKFDEDGFKECNLNDTRYVNRFLCQFVADHILLTGKGKRRVFASNGQITNLLRGFWGLRKVRAENDRHHALDAVVVACSTVAMQQKITRFVRYKEMNAFDGKTIDKETGKVLHQKTHFPQPWEFFAQEVMIRVFGKPDGKPEFEEADTPEKLRTLLAEKLSSRPEAVHEYVTPLFVSRAPNRKMSGAHKDTLRSAKRFVKHNEKISVKRVWLTEIKLADLENMVNYKNGREIELYEALKARLEAYGGNAKQAFDPKDNPFYKKGGQLVKAVRVEKTQESGVLLNKKNAYTIADNGDMVRVDVFCKVDKKGKNQYFIVPIYAWQVAENILPDIDCKGYRIDDSYTFCFSLHKYDLIAFQKDEKSKVEFAYYINCDSSNGRFYLAWHDKGSKEQQFRISTQNLVLIQKYQVNELGKEIRPCRLKKRPPVRSGKRTADGSEFESPKKKRKVE

SEQ ID NO: 158 - protein, 1097 aa, synthetic construct
MAAFKPNPINYILGLDIGIASVGWAMVEIDEEENPIRLIDLGVRVFERAEVPKTGDSLAMARRLARSVRRLTRRRAHRLLRARRLLKREGVLQAADFDENGLIKSLPNTPWQLRAAALDRKLTPLEWSAVLLHLIKHRGYLSQRKNEGETADKELGALLKGVANNAHALQTGDFRTPAELALNKFEKESGHIRNQRGDYSHTFSRKDLQAELILLFEKQKEFGNPHVSGGLKEGIETLLMTQRPALSGDAVQKMLGHCTFEPAEPKAAKNTYTAERFIWLTKLNNLRILEQGSERPLTDTERATLMDEPYRKSKLTYAQARKLLGLEDTAFFKGLRYGKDNAEASTLMEMKAYHAISRALEKEGLKDKKSPLNLSSELQDEIGTAFSLFKTDEDITGRLKDRVQPEILEALLKHISFDKFVQISLKALRRIVPLMEQGKRYDEACAEIYGDHYGKKNTEEKIYLPPIPADEIRNPVVLRALSQARKVINGVVRRYGSPARIHIETAREVGKSFKDRKEIEKRQEENRKDREKAAAKFREYFPNFVGEPKSKDILKLRLYEQQHGKCLYSGKEINLVRLNEKGYVEIDHALPFSRTWDDSFNNKVLVLGSENQNKGNQTPYEYFNGKDNSREWQEFKARVETSRFPRSKKQRILLQKFDEDGFKECNLNDTRYVNRFLCQFVADHILLTGKGKRRVFASNGQITNLLRGFWGLRKVRAENDRHHALDAVVVACSTVAMQQKITRFVRYKEMNAFDGKTIDKETGKVLHQKTHFPQPWEFFAQEVMIRVFGKPDGKPEFEEADTPEKLRTLLAEKLSSRPEAVHEYVTPLFVSRAPNRKMSGAHKDTLRSAKRFVKHNEKISVKRVWLTEIKLADLENMVNYKNGREIELYEALKARLEAYGGNAKQAFDPKDNPFYKKGGQLVKAVRVEKTQESGVLLNKKNAYTIADNGDMVRVDVFCKVDKSGGGSPKKKRKVSGGSGKNQYFIVPIYAWQVAENILPDIDCKGYRIDDSYTFCFSLHKYDLIAFQKDEKSKVEFAYYINCDSSNGRFYLAWHDKGSKEQQFRISTQNLVLIQKYQVNELGKEIRPCRLKKRPPVR

SEQ ID NO: 159 - protein, 1110 aa, synthetic construct
MVPKKKRKVAAFKPNPINYILGLDIGIASVGWAMVEIDEEENPIRLIDLGVRVFERAEVPKTGDSLAMARRLARSVRRLTRRRAHRLLRARRLLKREGVLQAADFDENGLIKSLPNTPWQLRAAALDRKLTPLEWSAVLLHLIKHRGYLSQRKNEGETADKELGALLKGVANNAHALQTGDFRTPAELALNKFEKESGHIRNQRGDYSHTFSRKDLQAELILLFEKQKEFGNPHVSGGLKEGIETLLMTQRPALSGDAVQKMLGHCTFEPAEPKAAKNTYTAERFIWLTKLNNLRILEQGSERPLTDTERATLMDEPYRKSKLTYAQARKLLGLEDTAFFKGLRYGKDNAEASTLMEMKAYHAISRALEKEGLKDKKSPLNLSSELQDEIGTAFSLFKTDEDITGRLKDRVQPEILEALLKHISFDKFVQISLKALRRIVPLMEQGKRYDEACAEIYGDHYGKKNTEEKIYLPPIPADEIRNPVVLRALSQARKVINGVVRRYGSPARIHIETAREVGKSFKDRKEIEKRQEENRKDREKAAAKFREYFPNFVGEPKSKDILKLRLYEQQHGKCLYSGKEINLVRLNEKGYVEIDHALPFSRTWDDSFNNKVLVLGSENQNKGNQTPYEYFNGKDNSREWQEFKARVETSRFPRSKKQRILLQKFDEDGFKECNLNDTRYVNRFLCQFVADHILLTGKGKRRVFASNGQITNLLRGFWGLRKVRAENDRHHALDAVVVACSTVAMQQKITRFVRYKEMNAFDGKTIDKETGKVLHQKTHFPQPWEFFAQEVMIRVFGKPDGKPEFEEADTPEKLRTLLAEKLSSRPEAVHEYVTPLFVSRAPNRKMSGAHKDTLRSAKRFVKHNEKISVKRVWLTEIKLADLENMVNYKNGREIELYEALKARLEAYGGNAKQAFDPKDNPFYKKGGQLVKAVRVEKTQESGVLLNKKNAYTIADNGDMVRVDVFCKVDKKGKNQYFIVPIYAWQVAENILPDIDCKGYRIDDSYTFCFSLHKYDLIAFQKDEKSKVEFAYYINCDSSNGRFYLAWHDKGSKEQQFRISTQNLVLIQKYQVNELGKEIRPCRLKKRPPVRYPYDVPDYAAAPAAKKKKLD

SEQ ID NO: 160 - protein, 1082 aa, synthetic construct
MAAFKPNPINYILGLDIGIASVGWAMVEIDEEENPIRLIDLGVRVFERAEVPKTGDSLAMARRLARSVRRLTRRRAHRLLRARRLLKREGVLQAADFDENGLIKSLPNTPWQLRAAALDRKLTPLEWSAVLLHLIKHRGYLSQRKNEGETADKELGALLKGVANNAHALQTGDFRTPAELALNKFEKESGHIRNQRGDYSHTFSRKDLQAELILLFEKQKEFGNPHVSGGLKEGIETLLMTQRPALSGDAVQKMLGHCTFEPAEPKAAKNTYTAERFIWLTKLNNLRILEQGSERPLTDTERATLMDEPYRKSKLTYAQARKLLGLEDTAFFKGLRYGKDNAEASTLMEMKAYHAISRALEKEGLKDKKSPLNLSSELQDEIGTAFSLFKTDEDITGRLKDRVQPEILEALLKHISFDKFVQISLKALRRIVPLMEQGKRYDEACAEIYGDHYGKKNTEEKIYLPPIPADEIRNPVVLRALSQARKVINGVVRRYGSPARIHIETAREVGKSFKDRKEIEKRQEENRKDREKAAAKFREYFPNFVGEPKSKDILKLRLYEQQHGKCLYSGKEINLVRLNEKGYVEIDHALPFSRTWDDSFNNKVLVLGSENQNKGNQTPYEYFNGKDNSREWQEFKARVETSRFPRSKKQRILLQKFDEDGFKECNLNDTRYVNRFLCQFVADHILLTGKGKRRVFASNGQITNLLRGFWGLRKVRAENDRHHALDAVVVACSTVAMQQKITRFVRYKEMNAFDGKTIDKETGKVLHQKTHFPQPWEFFAQEVMIRVFGKPDGKPEFEEADTPEKLRTLLAEKLSSRPEAVHEYVTPLFVSRAPNRKMSGAHKDTLRSAKRFVKHNEKISVKRVWLTEIKLADLENMVNYKNGREIELYEALKARLEAYGGNAKQAFDPKDNPFYKKGGQLVKAVRVEKTQESGVLLNKKNAYTIADNGDMVRVDVFCKVDKKGKNQYFIVPIYAWQVAENILPDIDCKGYRIDDSYTFCFSLHKYDLIAFQKDEKSKVEFAYYINCDSSNGRFYLAWHDKGSKEQQFRISTQNLVLIQKYQVNELGKEIRPCRLKKRPPVR

SEQ ID NO: 161 - protein, 1082 aa, synthetic construct; identical to SEQ ID NO: 160

SEQ ID NO: 162 - protein, 1102 aa, synthetic construct
MDGSGGGSPKKKRKVGGSGGGAAFKPNPINYILGLDIGIASVGWAMVEIDEEENPIRLIDLGVRVFERAEVPKTGDSLAMARRLARSVRRLTRRRAHRLLRARRLLKREGVLQAADFDENGLIKSLPNTPWQLRAAALDRKLTPLEWSAVLLHLIKHRGYLSQRKNEGETADKELGALLKGVANNAHALQTGDFRTPAELALNKFEKESGHIRNQRGDYSHTFSRKDLQAELILLFEKQKEFGNPHVSGGLKEGIETLLMTQRPALSGDAVQKMLGHCTFEPAEPKAAKNTYTAERFIWLTKLNNLRILEQGSERPLTDTERATLMDEPYRKSKLTYAQARKLLGLEDTAFFKGLRYGKDNAEASTLMEMKAYHAISRALEKEGLKDKKSPLNLSSELQDEIGTAFSLFKTDEDITGRLKDRVQPEILEALLKHISFDKFVQISLKALRRIVPLMEQGKRYDEACAEIYGDHYGKKNTEEKIYLPPIPADEIRNPVVLRALSQARKVINGVVRRYGSPARIHIETAREVGKSFKDRKEIEKRQEENRKDREKAAAKFREYFPNFVGEPKSKDILKLRLYEQQHGKCLYSGKEINLVRLNEKGYVEIDHALPFSRTWDDSFNNKVLVLGSENQNKGNQTPYEYFNGKDNSREWQEFKARVETSRFPRSKKQRILLQKFDEDGFKECNLNDTRYVNRFLCQFVADHILLTGKGKRRVFASNGQITNLLRGFWGLRKVRAENDRHHALDAVVVACSTVAMQQKITRFVRYKEMNAFDGKTIDKETGKVLHQKTHFPQPWEFFAQEVMIRVFGKPDGKPEFEEADTPEKLRTLLAEKLSSRPEAVHEYVTPLFVSRAPNRKMSGAHKDTLRSAKRFVKHNEKISVKRVWLTEIKLADLENMVNYKNGREIELYEALKARLEAYGGNAKQAFDPKDNPFYKKGGQLVKAVRVEKTQESGVLLNKKNAYTIADNGDMVRVDVFCKVDKKGKNQYFIVPIYAWQVAENILPDIDCKGYRIDDSYTFCFSLHKYDLIAFQKDEKSKVEFAYYINCDSSNGRFYLAWHDKGSKEQQFRISTQNLVLIQKYQVNELGKEIRPCRLKKRPPVR

SEQ ID NO: 163 - protein, 1121 aa, synthetic construct
MDGSGGGSPKKKRKVGGSGGGAAFKPNPINYILGLDIGIASVGWAMVEIDEEENPIRLIDLGVRVFERAEVPKTGDSLAMARRLARSVRRLTRRRAHRLLRARRLLKREGVLQAADFDENGLIKSLPNTPWQLRAAALDRKLTPLEWSAVLLHLIKHRGYLSQRKNEGETADKELGALLKGVANNAHALQTGDFRTPAELALNKFEKESGHIRNQRGDYSHTFSRKDLQAELILLFEKQKEFGNPHVSGGLKEGIETLLMTQRPALSGDAVQKMLGHCTFEPAEPKAAKNTYTAERFIWLTKLNNLRILEQGSERPLTDTERATLMDEPYRKSKLTYAQARKLLGLEDTAFFKGLRYGKDNAEASTLMEMKAYHAISRALEKEGLKDKKSPLNLSSELQDEIGTAFSLFKTDEDITGRLKDRVQPEILEALLKHISFDKFVQISLKALRRIVPLMEQGKRYDEACAEIYGDHYGKKNTEEKIYLPPIPADEIRNPVVLRALSQARKVINGVVRRYGSPARIHIETAREVGKSFKDRKEIEKRQEENRKDREKAAAKFREYFPNFVGEPKSKDILKLRLYEQQHGKCLYSGKEINLVRLNEKGYVEIDHALPFSRTWDDSFNNKVLVLGSENQNKGNQTPYEYFNGKDNSREWQEFKARVETSRFPRSKKQRILLQKFDEDGFKECNLNDTRYVNRFLCQFVADHILLTGKGKRRVFASNGQITNLLRGFWGLRKVRAENDRHHALDAVVVACSTVAMQQKITRFVRYKEMNAFDGKTIDKETGKVLHQKTHFPQPWEFFAQEVMIRVFGKPDGKPEFEEADTPEKLRTLLAEKLSSRPEAVHEYVTPLFVSRAPNRKMSGAHKDTLRSAKRFVKHNEKISVKRVWLTEIKLADLENMVNYKNGREIELYEALKARLEAYGGNAKQAFDPKDNPFYKKGGQLVKAVRVEKTQESGVLLNKKNAYTIADNGDMVRVDVFCKVDKKGKNQYFIVPIYAWQVAENILPDIDCKGYRIDDSYTFCFSLHKYDLIAFQKDEKSKVEFAYYINCDSSNGRFYLAWHDKGSKEQQFRISTQNLVLIQKYQVNELGKEIRPCRLKKRPPVRSESATPESVSGWRLFKKIS

SEQ ID NO: 164 - protein, 1124 aa, synthetic construct
MDGSGGGSPKKKRKVGGSGGGAAFKPNPINYILGLDIGIASVGWAMVEIDEEENPIRLIDLGVRVFERAEVPKTGDSLAMARRLARSVRRLTRRRAHRLLRARRLLKREGVLQAADFDENGLIKSLPNTPWQLRAAALDRKLTPLEWSAVLLHLIKHRGYLSQRKNEGETADKELGALLKGVANNAHALQTGDFRTPAELALNKFEKESGHIRNQRGDYSHTFSRKDLQAELILLFEKQKEFGNPHVSGGLKEGIETLLMTQRPALSGDAVQKMLGHCTFEPAEPKAAKNTYTAERFIWLTKLNNLRILEQGSERPLTDTERATLMDEPYRKSKLTYAQARKLLGLEDTAFFKGLRYGKDNAEASTLMEMKAYHAISRALEKEGLKDKKSPLNLSSELQDEIGTAFSLFKTDEDITGRLKDRVQPEILEALLKHISFDKFVQISLKALRRIVPLMEQGKRYDEACAEIYGDHYGKKNTEEKIYLPPIPADEIRNPVVLRALSQARKVINGVVRRYGSPARIHIETAREVGKSFKDRKEIEKRQEENRKDREKAAAKFREYFPNFVGEPKSKDILKLRLYEQQHGKCLYSGKEINLVRLNEKGYVEIDHALPFSRTWDDSFNNKVLVLGSENQNKGNQTPYEYFNGKDNSREWQEFKARVETSRFPRSKKQRILLQKFDEDGFKECNLNDTRYVNRFLCQFVADHILLTGKGKRRVFASNGQITNLLRGFWGLRKVRAENDRHHALDAVVVACSTVAMQQKITRFVRYKEMNAFDGKTIDKETGKVLHQKTHFPQPWEFFAQEVMIRVFGKPDGKPEFEEADTPEKLRTLLAEKLSSRPEAVHEYVTPLFVSRAPNRKMSGAHKDTLRSAKRFVKHNEKISVKRVWLTEIKLADLENMVNYKNGREIELYEALKARLEAYGGNAKQAFDPKDNPFYKKGGQLVKAVRVEKTQESGVLLNKKNAYTIADNGDMVRVDVFCKVDKKGKNQYFIVPIYAWQVAENILPDIDCKGYRIDDSYTFCFSLHKYDLIAFQKDEKSKVEFAYYINCDSSNGRFYLAWHDKGSKEQQFRISTQNLVLIQKYQVNELGKEIRPCRLKKRPPVRSGKRTADGSGGGSPAAKKKKLD

SEQ ID NO: 165 - protein, 1120 aa, synthetic construct
MDGSGGGSPKKKRKVEDKRPAATKKAGQAKKKKGGSGGGAAFKPNPINYILGLDIGIASVGWAMVEIDEEENPIRLIDLGVRVFERAEVPKTGDSLAMARRLARSVRRLTRRRAHRLLRARRLLKREGVLQAADFDENGLIKSLPNTPWQLRAAALDRKLTPLEWSAVLLHLIKHRGYLSQRKNEGETADKELGALLKGVANNAHALQTGDFRTPAELALNKFEKESGHIRNQRGDYSHTFSRKDLQAELILLFEKQKEFGNPHVSGGLKEGIETLLMTQRPALSGDAVQKMLGHCTFEPAEPKAAKNTYTAERFIWLTKLNNLRILEQGSERPLTDTERATLMDEPYRKSKLTYAQARKLLGLEDTAFFKGLRYGKDNAEASTLMEMKAYHAISRALEKEGLKDKKSPLNLSSELQDEIGTAFSLFKTDEDITGRLKDRVQPEILEALLKHISFDKFVQISLKALRRIVPLMEQGKRYDEACAEIYGDHYGKKNTEEKIYLPPIPADEIRNPVVLRALSQARKVINGVVRRYGSPARIHIETAREVGKSFKDRKEIEKRQEENRKDREKAAAKFREYFPNFVGEPKSKDILKLRLYEQQHGKCLYSGKEINLVRLNEKGYVEIDHALPFSRTWDDSFNNKVLVLGSENQNKGNQTPYEYFNGKDNSREWQEFKARVETSRFPRSKKQRILLQKFDEDGFKECNLNDTRYVNRFLCQFVADHILLTGKGKRRVFASNGQITNLLRGFWGLRKVRAENDRHHALDAVVVACSTVAMQQKITRFVRYKEMNAFDGKTIDKETGKVLHQKTHFPQPWEFFAQEVMIRVFGKPDGKPEFEEADTPEKLRTLLAEKLSSRPEAVHEYVTPLFVSRAPNRKMSGAHKDTLRSAKRFVKHNEKISVKRVWLTEIKLADLENMVNYKNGREIELYEALKARLEAYGGNAKQAFDPKDNPFYKKGGQLVKAVRVEKTQESGVLLNKKNAYTIADNGDMVRVDVFCKVDKKGKNQYFIVPIYAWQVAENILPDIDCKGYRIDDSYTFCFSLHKYDLIAFQKDEKSKVEFAYYINCDSSNGRFYLAWHDKGSKEQQFRISTQNLVLIQKYQVNELGKEIRPCRLKKRPPVR

SEQ ID NO: 166 - protein, 1139 aa, synthetic construct
MDGSGGGSPKKKRKVEDKRPAATKKAGQAKKKKGGSGGGAAFKPNPINYILGLDIGIASVGWAMVEIDEEENPIRLIDLGVRVFERAEVPKTGDSLAMARRLARSVRRLTRRRAHRLLRARRLLKREGVLQAADFDENGLIKSLPNTPWQLRAAALDRKLTPLEWSAVLLHLIKHRGYLSQRKNEGETADKELGALLKGVANNAHALQTGDFRTPAELALNKFEKESGHIRNQRGDYSHTFSRKDLQAELILLFEKQKEFGNPHVSGGLKEGIETLLMTQRPALSGDAVQKMLGHCTFEPAEPKAAKNTYTAERFIWLTKLNNLRILEQGSERPLTDTERATLMDEPYRKSKLTYAQARKLLGLEDTAFFKGLRYGKDNAEASTLMEMKAYHAISRALEKEGLKDKKSPLNLSSELQDEIGTAFSLFKTDEDITGRLKDRVQPEILEALLKHISFDKFVQISLKALRRIVPLMEQGKRYDEACAEIYGDHYGKKNTEEKIYLPPIPADEIRNPVVLRALSQARKVINGVVRRYGSPARIHIETAREVGKSFKDRKEIEKRQEENRKDREKAAAKFREYFPNFVGEPKSKDILKLRLYEQQHGKCLYSGKEINLVRLNEKGYVEIDHALPFSRTWDDSFNNKVLVLGSENQNKGNQTPYEYFNGKDNSREWQEFKARVETSRFPRSKKQRILLQKFDEDGFKECNLNDTRYVNRFLCQFVADHILLTGKGKRRVFASNGQITNLLRGFWGLRKVRAENDRHHALDAVVVACSTVAMQQKITRFVRYKEMNAFDGKTIDKETGKVLHQKTHFPQPWEFFAQEVMIRVFGKPDGKPEFEEADTPEKLRTLLAEKLSSRPEAVHEYVTPLFVSRAPNRKMSGAHKDTLRSAKRFVKHNEKISVKRVWLTEIKLADLENMVNYKNGREIELYEALKARLEAYGGNAKQAFDPKDNPFYKKGGQLVKAVRVEKTQESGVLLNKKNAYTIADNGDMVRVDVFCKVDKKGKNQYFIVPIYAWQVAENILPDIDCKGYRIDDSYTFCFSLHKYDLIAFQKDEKSKVEFAYYINCDSSNGRFYLAWHDKGSKEQQFRISTQNLVLIQKYQVNELGKEIRPCRLKKRPPVRSESATPESVSGWRLFKKIS

SEQ ID NO: 167 - protein, 1113 aa, synthetic construct
MDGSGGGSEDKRPAATKKAGQAKKKKGGSGGGAAFKPNPINYILGLDIGIASVGWAMVEIDEEENPIRLIDLGVRVFERAEVPKTGDSLAMARRLARSVRRLTRRRAHRLLRARRLLKREGVLQAADFDENGLIKSLPNTPWQLRAAALDRKLTPLEWSAVLLHLIKHRGYLSQRKNEGETADKELGALLKGVANNAHALQTGDFRTPAELALNKFEKESGHIRNQRGDYSHTFSRKDLQAELILLFEKQKEFGNPHVSGGLKEGIETLLMTQRPALSGDAVQKMLGHCTFEPAEPKAAKNTYTAERFIWLTKLNNLRILEQGSERPLTDTERATLMDEPYRKSKLTYAQARKLLGLEDTAFFKGLRYGKDNAEASTLMEMKAYHAISRALEKEGLKDKKSPLNLSSELQDEIGTAFSLFKTDEDITGRLKDRVQPEILEALLKHISFDKFVQISLKALRRIVPLMEQGKRYDEACAEIYGDHYGKKNTEEKIYLPPIPADEIRNPVVLRALSQARKVINGVVRRYGSPARIHIETAREVGKSFKDRKEIEKRQEENRKDREKAAAKFREYFPNFVGEPKSKDILKLRLYEQQHGKCLYSGKEINLVRLNEKGYVEIDHALPFSRTWDDSFNNKVLVLGSENQNKGNQTPYEYFNGKDNSREWQEFKARVETSRFPRSKKQRILLQKFDEDGFKECNLNDTRYVNRFLCQFVADHILLTGKGKRRVFASNGQITNLLRGFWGLRKVRAENDRHHALDAVVVACSTVAMQQKITRFVRYKEMNAFDGKTIDKETGKVLHQKTHFPQPWEFFAQEVMIRVFGKPDGKPEFEEADTPEKLRTLLAEKLSSRPEAVHEYVTPLFVSRAPNRKMSGAHKDTLRSAKRFVKHNEKISVKRVWLTEIKLADLENMVNYKNGREIELYEALKARLEAYGGNAKQAFDPKDNPFYKKGGQLVKAVRVEKTQESGVLLNKKNAYTIADNGDMVRVDVFCKVDKKGKNQYFIVPIYAWQVAENILPDIDCKGYRIDDSYTFCFSLHKYDLIAFQKDEKSKVEFAYYINCDSSNGRFYLAWHDKGSKEQQFRISTQNLVLIQKYQVNELGKEIRPCRLKKRPPVR

SEQ ID NO: 168 - RNA, 3837 nt, synthetic construct
  source 1..3837: mol_type = other RNA
gggaagctcagaataaacgctcaactttggccggatctgccaccatgaccggtgccgccttcaagcccaaccccatcaactacatcctgggcctggacatcggcatcgcctccgtgggctgggccatggtggagatcgacgaggaggagaaccccatccggctgatcgacctgggcgtgcgggtgttcgagcgggccgaggtgcccaagaccggcgactccctggccatggcccggcggctggcccggtccgtgcggcggctgacccggcggcgggcccaccggctgctgcgggcccggcggctgctgaagcgggagggcgtgctgcaggccgccgacttcgacgagaacggcctgatcaagtccctgcccaacaccccctggcagctgcgggccgccgccctggaccggaagctgacccccctggagtggtccgccgtgctgctgcacctgatcaagcaccggggctacctgtcccagcggaagaacgagggcgagaccgccgacaaggagctgggcgccctgctgaagggcgtggccaacaacgcccacgccctgcagaccggcgacttccggacccccgccgagctggccctgaacaagttcgagaaggagtccggccacatccggaaccagcggggcgactactcccacaccttctcccggaaggacctgcaggccgagctgatcctgctgttcgagaagcagaaggagttcggcaacccccacgtgtccggcggcctgaaggagggcatcgagaccctgctgatgacccagcggcccgccctgtccggcgacgccgtgcagaagatgctgggccactgcaccttcgagcccgccgagcccaaggccgccaagaacacctacaccgccgagcggttcatctggctgaccaagctgaacaacctgcggatcctggagcagggctccgagcggcccctgaccgacaccgagcgggccaccctgatggacgagccctaccggaagtccaagctgacctacgcccaggcccggaagctgctgggcctggaggacaccgccttcttcaagggcctgcggtacggcaaggacaacgccgaggcctccaccctgatggagatgaaggcctaccacgccatctcccgggccctggagaaggagggcctgaaggacaagaagtcccccctgaacctgtcctccgagctgcaggacgagatcggcaccgccttctccctgttcaagaccgacgaggacatcaccggccggctgaaggaccgggtgcagcccgagatcctggaggccctgctgaagcacatctccttcgacaagttcgtgcagatctccctgaaggccctgcggcggatcgtgcccctgatggagcagggcaagcggtacgacgaggcctgcgccgagatctacggcgaccactacggcaagaagaacaccgaggagaagatctacctgccccccatccccgccgacgagatccggaaccccgtggtgctgcgggccctgtcccaggcccggaaggtgatcaacggcgtggtgcggcggtacggctcccccgcccggatccacatcgagaccgcccgggaggtgggcaagtccttcaaggaccggaaggagatcgagaagcggcaggaggagaaccggaaggaccgggagaaggccgccgccaagttccgggagtacttccccaacttcgtgggcgagcccaagtccaaggacatcctgaagctgcggctgtacgagcagcagcacggcaagtgcctgtactccggcaaggagatcaacctggtgcggctgaacgagaagggctacgtggagatcgaccacgccctgcccttctcccggacctgggacgactccttcaacaacaaggtgctggtgctgggctccgagaaccagaacaagggcaaccagaccccctacgagtacttcaacggcaaggacaactcccgggagtggcaggagttcaaggcccgggtggagacctcccggttcccccggtccaagaagcagcggatcctgctgcagaagttcgacgaggacggcttcaaggagtgcaacctgaacgacacccggtacgtgaaccgcttcctgtgccagttcgtggccgaccacatcctgctgaccggcaagggcaagcggcgggtgttcgcctccaacggccagatcaccaacctgctgcggggcttctggggcctgcggaaggtgcgggccgagaacgaccggcaccacgccctggacgccgtggtggtggcctgctccaccgtggccatgcagcagaagatcacccggttcgtgcggtacaaggagatgaacgccttcgacggcaagaccatcgacaaggagaccggcaaggtgctgcaccagaagacccacttcccccagccctgggagttcttcgcccaggaggtgatgatccgggtgttcggcaagcccgacggcaagcccgagttcgaggaggccgacacccccgagaagctgcggaccctgctggccgagaagctgtcctcccggcccgaggccgtgcacgagtacgtgacccccctgttcgtgtcccgggcccccaaccggaagatgtccggcgcccacaaggacaccctgcggtccgccaagcggttcgtgaagcacaacgagaagatctccgtgaagcgggtgtggctgaccgagatcaagctggccgacctggagaacatggtgaactacaagaacggccgggagatcgagctgtacgaggccctgaaggcccggctggaggcctacggcggcaacgccaagcaggccttcgaccccaaggacaaccccttctacaagaagggcggccagctggtgaaggccgtgcgggtggagaagacccaggagtccggcgtgctgctgaacaagaagaacgcctacaccatcgccgacaacggcgacatggtgcgggtggacgtgttctgcaaggtggacaagaagggcaagaaccagtacttcatcgtgcccatctacgcctggcaggtggccgagaacatcctgcccgacatcgactgcaagggctaccggatcgacgactcctacaccttctgcttctccctgcacaagtacgacctgatcgccttccagaaggacgagaagtccaaggtggagttcgcctactacatcaactgcgactcctccaacggccggttctacctggcctggcacgacaagggctccaaggagcagcagttccggatctccacccagaacctggtgctgatccagaagtaccaggtgaacgagctgggcaaggagatccggccctgccggctgaagaagcggccccccgtgcggtccggaaagcggaccgccgacggctccgagttcgagtcccccaagaagaagcggaaggtggagtagctagcaccagcctcaagaacacccgaatggagtctctaagctacataataccaacttacactttacaaaatgttgtcccccaaaatgtagccattcgtatctgctcctaataaaaagaaagtttcttcacattctctcgagaaaaaaaaaaaatggaaaaaaaaaaaacggaaaaaaaaaaaaggtaaaaaaaaaaaatataaaaaaaaaaaacataaaaaaaaaaaacgaaaaaaaaaaaacgtaaaaaaaaaaaactcaaaaaaaaaaaagataaaaaaaaaaaacctaaaaaaaaaaaatgtaaaaaaaaaaaagggaaaaaaaaaaaacgcaaaaaaaaaaaacacaaaaaaaaaaaatgcaaaaaaaaaaaatcgaaaaaaaaaaaatctaaaaaaaaaaaacgaaaaaaaaaaaacccaaaaaaaaaaaagacaaaaaaaaaaaatagaaaaaaaaaaaagttaaaaaa

SEQ ID NO: 169 - DNA, 3850 bp, synthetic construct
  source 1..3850: mol_type = other DNA
gggaagctcagaataaacgctcaactttggccggatctgccaccatggccgccttcaagcccaaccccatcaactacatcctgggcctggacatcggcatcgcctccgtgggctgggccatggtggagatcgacgaggaggagaaccccatccggctgatcgacctgggcgtgcgggtgttcgagcgggccgaggtgcccaagaccggcgactccctggccatggcccggcggctggcccggtccgtgcggcggctgacccggcggcgggcccaccggctgctgcgggcccggcggctgctgaagcgggagggcgtgctgcaggccgccgacttcgacgagaacggcctgatcaagtccctgcccaacaccccctggcagctgcgggccgccgccctggaccggaagctgacccccctggagtggtccgccgtgctgctgcacctgatcaagcaccggggctacctgtcccagcggaagaacgagggcgagaccgccgacaaggagctgggcgccctgctgaagggcgtggccaacaacgcccacgccctgcagaccggcgacttccggacccccgccgagctggccctgaacaagttcgagaaggagtccggccacatccggaaccagcggggcgactactcccacaccttctcccggaaggacctgcaggccgagctgatcctgctgttcgagaagcagaaggagttcggcaacccccacgtgtccggcggcctgaaggagggcatcgagaccctgctgatgacccagcggcccgccctgtccggcgacgccgtgcagaagatgctgggccactgcaccttcgagcccgccgagcccaaggccgccaagaacacctacaccgccgagcggttcatctggctgaccaagctgaacaacctgcggatcctggagcagggctccgagcggcccctgaccgacaccgagcgggccaccctgatggacgagccctaccggaagtccaagctgacctacgcccaggcccggaagctgctgggcctggaggacaccgccttcttcaagggcctgcggtacggcaaggacaacgccgaggcctccaccctgatggagatgaaggcctaccacgccatctcccgggccctggagaaggagggcctgaaggacaagaagtcccccctgaacctgtcctccgagctgcaggacgagatcggcaccgccttctccctgttcaagaccgacgaggacatcaccggccggctgaaggaccgggtgcagcccgagatcctggaggccctgctgaagcacatctccttcgacaagttcgtgcagatctccctgaaggccctgcggcggatcgtgcccctgatggagcagggcaagcggtacgacgaggcctgcgccgagatctacggcgaccactacggcaagaagaacaccgaggagaagatctacctgccccccatccccgccgacgagatccggaaccccgtggtgctgcgggccctgtcccaggcccggaaggtgatcaacggcgtggtgcggcggtacggctcccccgcccggatccacatcgagaccgcccgggaggtgggcaagtccttcaaggaccggaaggagatcgagaagcggcaggaggagaaccggaaggaccgggagaaggccgccgccaagttccgggagtacttccccaacttcgtgggcgagcccaagtccaaggacatcctgaagctgcggctgtacgagcagcagcacggcaagtgcctgtactccggcaaggagatcaacctggtgcggctgaacgagaagggctacgtggagatcgaccacgccctgcccttctcccggacctgggacgactccttcaacaacaaggtgctggtgctgggctccgagaaccagaacaagggcaaccagaccccctacgagtacttcaacggcaaggacaactcccgggagtggcaggagttcaaggcccgggtggagacctcccggttcccccggtccaagaagcagcggatcctgctgcagaagttcgacgaggacggcttcaaggagtgcaacctgaacgacacccggtacgtgaaccggttcctgtgccagttcgtggccgaccacatcctgctgaccggcaagggcaagcggcgggtgttcgcctccaacggccagatcaccaacctgctgcggggcttctggggcctgcggaaggtgcgggccgagaacgaccggcaccacgccctggacgccgtggtggtggcctgctccaccgtggccatgcagcagaagatcacccggttcgtgcggtacaaggagatgaacgccttcgacggcaagaccatcgacaaggagaccggcaaggtgctgcaccagaagacccacttcccccagccctgggagttcttcgcccaggaggtgatgatccgggtgttcggcaagcccgacggcaagcccgagttcgaggaggccgacacccccgagaagctgcggaccctgctggccgagaagctgtcctcccggcccgaggccgtgcacgagtacgtgacccccctgttcgtgtcccgggcccccaaccggaagatgtccggcgcccacaaggacaccctgcggtccgccaagcggttcgtgaagcacaacgagaagatctccgtgaagcgggtgtggctgaccgagatcaagctggccgacctggagaacatggtgaactacaagaacggccgggagatcgagctgtacgaggccctgaaggcccggctggaggcctacggcggcaacgccaagcaggccttcgaccccaaggacaaccccttctacaagaagggcggccagctggtgaaggccgtgcgggtggagaagacccaggagtccggcgtgctgctgaacaagaagaacgcctacaccatcgccgacaacggcgacatggtgcgggtggacgtgttctgcaaggtggacaagtccggcggcggctcccccaagaagaagcggaaggtgtccggcggctccggcaagaaccagtacttcatcgtgcccatctacgcctggcaggtggccgagaacatcctgcccgacatcgactgcaagggctaccggatcgacgactcctacaccttctgcttctccctgcacaagtacgacctgatcgccttccagaaggacgagaagtccaaggtggagttcgcctactacatcaactgcgactcctccaacggccggttctacctggcctggcacgacaagggctccaaggagcagcagttccggatctccacccagaacctggtgctgatccagaagtaccaggtgaacgagctgggcaaggagatccggccctgccggctgaagaagcggccccccgtgcggtagctagcaccagcctcaagaacacccgaatggagtctctaagctacataataccaacttacactttacaaaatgttgtcccccaaaatgtagccattcgtatctgctcctaataaaaagaaagtttcttcacattctctcgagaaaaaaaaaaaatggaaaaaaaaaaaacggaaaaaaaaaaaaggtaaaaaaaaaaaatataaaaaaaaaaaacataaaaaaaaaaaacgaaaaaaaaaaaacgtaaaaaaaaaaaactcaaaaaaaaaaaagataaaaaaaaaaaacctaaaaaaaaaaaatgtaaaaaaaaaaaagggaaaaaaaaaaaacgcaaaaaaaaaaaacacaaaaaaaaaaaatgcaaaaaaaaaaaatcgaaaaaaaaaaaatctaaaaaaaaaaaacgaaaaaaaaaaaacccaaaaaaaaaaaagacaaaaaaaaaaaatagaaaaaaaaaaaagttaaaaaaaaaaaactgaaaaaaaaaaaatttaaaaaaaaaaaat

SEQ ID NO: 170 - DNA, 3889 bp, synthetic construct
  source 1..3889: mol_type = other DNA
gggaagctcagaataaacgctcaactttggccggatctgccaccatggtgcccaagaagaagcggaaggtggccgccttcaagcccaaccccatcaactacatcctgggcctggacatcggcatcgcctccgtgggctgggccatggtggagatcgacgaggaggagaaccccatccggctgatcgacctgggcgtgcgggtgttcgagcgggccgaggtgcccaagaccggcgactccctggccatggcccggcggctggcccggtccgtgcggcggctgacccggcggcgggcccaccggctgctgcgggcccggcggctgctgaagcgggagggcgtgctgcaggccgccgacttcgacgagaacggcctgatcaagtccctgcccaacaccccctggcagctgcgggccgccgccctggaccggaagctgacccccctggagtggtccgccgtgctgctgcacctgatcaagcaccggggctacctgtcccagcggaagaacgagggcgagaccgccgacaaggagctgggcgccctgctgaagggcgtggccaacaacgcccacgccctgcagaccggcgacttccggacccccgccgagctggccctgaacaagttcgagaaggagtccggccacatccggaaccagcggggcgactactcccacaccttctcccggaaggacctgcaggccgagctgatcctgctgttcgagaagcagaaggagttcggcaacccccacgtgtccggcggcctgaaggagggcatcgagaccctgctgatgacccagcggcccgccctgtccggcgacgccgtgcagaagatgctgggccactgcaccttcgagcccgccgagcccaaggccgccaagaacacctacaccgccgagcggttcatctggctgaccaagctgaacaacctgcggatcctggagcagggctccgagcggcccctgaccgacaccgagcgggccaccctgatggacgagccctaccggaagtccaagctgacctacgcccaggcccggaagctgctgggcctggaggacaccgccttcttcaagggcctgcggtacggcaaggacaacgccgaggcctccaccctgatggagatgaaggcctaccacgccatctcccgggccctggagaaggagggcctgaaggacaagaagtcccccctgaacctgtcctccgagctgcaggacgagatcggcaccgccttctccctgttcaagaccgacgaggacatcaccggccggctgaaggaccgggtgcagcccgagatcctggaggccctgctgaagcacatctccttcgacaagttcgtgcagatctccctgaaggccctgcggcggatcgtgcccctgatggagcagggcaagcggtacgacgaggcctgcgccgagatctacggcgaccactacggcaagaagaacaccgaggagaagatctacctgccccccatccccgccgacgagatccggaaccccgtggtgctgcgggccctgtcccaggcccggaaggtgatcaacggcgtggtgcggcggtacggctcccccgcccggatccacatcgagaccgcccgggaggtgggcaagtccttcaaggaccggaaggagatcgagaagcggcaggaggagaaccggaaggaccgggagaaggccgccgccaagttccgggagtacttccccaacttcgtgggcgagcccaagtccaaggacatcctgaagctgcggctgtacgagcagcagcacggcaagtgcctgtactccggcaaggagatcaacctggtgcggctgaacgagaagggctacgtggagatcgaccacgccctgcccttctcccggacctgggacgactccttcaacaacaaggtgctggtgctgggctccgagaaccagaacaagggcaaccagaccccctacgagtacttcaacggcaaggacaactcccgggagtggcaggagttcaaggcccgggtggagacctcccggttcccccggtccaagaagcagcggatcctgctgcagaagttcgacgaggacggcttcaaggagtgcaacctgaacgacacccggtacgtgaaccggttcctgtgccagttcgtggccgaccacatcctgctgaccggcaagggcaagcggcgggtgttcgcctccaacggccagatcaccaacctgctgcggggcttctggggcctgcggaaggtgcgggccgagaacgaccggcaccacgccctggacgccgtggtggtggcctgctccaccgtggccatgcagcagaagatcacccggttcgtgcggtacaaggagatgaacgccttcgacggcaagaccatcgacaaggagaccggcaaggtgctgcaccagaagacccacttcccccagccctgggagttcttcgcccaggaggtgatgatccgggtgttcggcaagcccgacggcaagcccgagttcgaggaggccgacacccccgagaagctgcggaccctgctggccgagaagctgtcctcccggcccgaggccgtgcacgagtacgtgacccccctgttcgtgtcccgggcccccaaccggaagatgtccggcgcccacaaggacaccctgcggtccgccaagcggttcgtgaagcacaacgagaagatctccgtgaagcgggtgtggctgaccgagatcaagctggccgacctggagaacatggtgaactacaagaacggccgggagatcgagctgtacgaggccctgaaggcccggctggaggcctacggcggcaacgccaagcaggccttcgaccccaaggacaaccccttctacaagaagggcggccagctggtgaaggccgtgcgggtggagaagacccaggagtccggcgtgctgctgaacaagaagaacgcctacaccatcgccgacaacggcgacatggtgcgggtggacgtgttctgcaaggtggacaagaagggcaagaaccagtacttcatcgtgcccatctacgcctggcaggtggccgagaacatcctgcccgacatcgactgcaagggctaccggatcgacgactcctacaccttctgcttctccctgcacaagtacgacctgatcgccttccagaaggacgagaagtccaaggtggagttcgcctactacatcaactgcgactcctccaacggccggttctacctggcctggcacgacaagggctccaaggagcagcagttccggatctccacccagaacctggtgctgatccagaagtaccaggtgaacgagctgggcaaggagatccggccctgccggctgaagaagcggccccccgtgcggtacccctacgacgtgcccgactacgccgccgcccccgccgccaagaagaagaagctggactagctagcaccagcctcaagaacacccgaatggagtctctaagctacataataccaacttacactttacaaaatgttgtcccccaaaatgtagccattcgtatctgctcctaataaaaagaaagtttcttcacattctctcgagaaaaaaaaaaaatggaaaaaaaaaaaacggaaaaaaaaaaaaggtaaaaaaaaaaaatataaaaaaaaaaaacataaaaaaaaaaaacgaaaaaaaaaaaacgtaaaaaaaaaaaactcaaaaaaaaaaaagataaaaaaaaaaaacctaaaaaaaaaaaatgtaaaaaaaaaaaagggaaaaaaaaaaaacgcaaaaaaaaaaaacacaaaaaaaaaaaatgcaaaaaaaaaaaatcgaaaaaaaaaaaatctaaaaaaaaaaaacgaaaaaaaaaaaacccaaaaaaaaaaaagacaaaaaaaaaaaatagaaaaaaaaaaaagttaaaaaaaaaaaactgaaaaaaaaaaaatttaaaaaaaaaaaat

SEQ ID NO: 171 - RNA, 4067 nt, synthetic construct
  source 1..4067: mol_type = other RNA
gggaagctcagaataaacgctcaactttggccggatctgccaccatggtgcccaagaagaagcggaaggtggaggacaagcggcccgccgccaccaagaaggccggccaggccaagaagaagaagatggccgccttcaagcccaaccccatcaactacatcctgggcctggacatcggcatcgcctccgtgggctgggccatggtggagatcgacgaggaggagaaccccatccggctgatcgacctgggcgtgcgggtgttcgagcgggccgaggtgcccaagaccggcgactccctggccatggcccggcggctggcccggtccgtgcggcggctgacccggcggcgggcccaccggctgctgcgggcccggcggctgctgaagcgggagggcgtgctgcaggccgccgacttcgacgagaacggcctgatcaagtccctgcccaacaccccctggcagctgcgggccgccgccctggaccggaagctgacccccctggagtggtccgccgtgctgctgcacctgatcaagcaccggggctacctgtcccagcggaagaacgagggcgagaccgccgacaaggagctgggcgccctgctgaagggcgtggccaacaacgcccacgccctgcagaccggcgacttccggacccccgccgagctggccctgaacaagttcgagaaggagtccggccacatccggaaccagcggggcgactactcccacaccttctcccggaaggacctgcaggccgagctgatcctgctgttcgagaagcagaaggagttcggcaacccccacgtgtccggcggcctgaaggagggcatcgagaccctgctgatgacccagcggcccgccctgtccggcgacgccgtgcagaagatgctgggccactgcaccttcgagcccgccgagcccaaggccgccaagaacacctacaccgccgagcggttcatctggctgaccaagctgaacaacctgcggatcctggagcagggctccgagcggcccctgaccgacaccgagcgggccaccctgatggacgagccctaccggaagtccaagctgacctacgcccaggcccggaagctgctgggcctggaggacaccgccttcttcaagggcctgcggtacggcaaggacaacgccgaggcctccaccctgatggagatgaaggcctaccacgccatctcccgggccctggagaaggagggcctgaaggacaagaagtcccccctgaacctgtcctccgagctgcaggacgagatcggcaccgccttctccctgttcaagaccgacgaggacatcaccggccggctgaaggaccgggtgcagcccgagatcctggaggccctgctgaagcacatctccttcgacaagttcgtgcagatctccctgaaggccctgcggcggatcgtgcccctgatggagcagggcaagcggtacgacgaggcctgcgccgagatctacggcgaccactacggcaagaagaacaccgaggagaagatctacctgccccccatccccgccgacgagatccggaaccccgtggtgctgcgggccctgtcccaggcccggaaggtgatcaacggcgtggtgcggcggtacggctcccccgcccggatccacatcgagaccgcccgggaggtgggcaagtccttcaaggaccggaaggagatcgagaagcggcaggaggagaaccggaaggaccgggagaaggccgccgccaagttccgggagtacttccccaacttcgtgggcgagcccaagtccaaggacatcctgaagctgcggctgtacgagcagcagcacggcaagtgcctgtactccggcaaggagatcaacctggtgcggctgaacgagaagggctacgtggagatcgaccacgccctgcccttctcccggacctgggacgactccttcaacaacaaggtgctggtgctgggctccgagaaccagaacaagggcaaccagaccccctacgagtacttcaacggcaaggacaactcccgggagtggcaggagttcaaggcccgggtggagacctcccggttcccccggtccaagaagcagcggatcctgctgcagaagttcgacgaggacggcttcaaggagtgcaacctgaacgacacccggtacgtgaaccggttcctgtgccagttcgtggccgaccacatcctgctgaccggcaagggcaagcggcgggtgttcgcctccaacggccagatcaccaacctgctgcggggcttctggggcctgcggaaggtgcgggccgagaacgaccggcaccacgccctggacgccgtggtggtggcctgctccaccgtggccatgcagcagaagatcacccggttcgtgcggtacaaggagatgaacgccttcgacggcaagaccatcgacaaggagaccggcaaggtgctgcaccagaagacccacttcccccagccctgggagttcttcgcccaggaggtgatgatccgggtgttcggcaagcccgacggcaagcccgagttcgaggaggccgacacccccgagaagctgcggaccctgctggccgagaagctgtcctcccggcccgaggccgtgcacgagtacgtgacccccctgttcgtgtcccgggcccccaaccggaagatgtccggcgcccacaaggacaccctgcggtccgccaagcggttcgtgaagcacaacgagaagatctccgtgaagcgggtgtggctgaccgagatcaagctggccgacctggagaacatggtgaactacaagaacggccgggagatcgagctgtacgaggccctgaaggcccggctggaggcctacggcggcaacgccaagcaggccttcgaccccaaggacaaccccttctacaagaagggcggccagctggtgaaggccgtgcgggtggagaagacccaggagtccggcgtgctgctgaacaagaagaacgcctacaccatcgccgacaacggcgacatggtgcgggtggacgtgttctgcaaggtggacaagaagggcaagaaccagtacttcatcgtgcccatctacgcctggcaggtggccgagaacatcctgcccgacatcgactgcaagggctaccggatcgacgactcctacaccttctgcttctccctgcacaagtacgacctgatcgccttccagaaggacgagaagtccaaggtggagttcgcctactacatcaactgcgactcctccaacggccggttctacctggcctggcacgacaagggctccaaggagcagcagttccggatctccacccagaacctggtgctgatccagaagtaccaggtgaacgagctgggcaaggagatccggccctgccggctgaagaagcggccccccgtgcgggaggacaagcggcccgccgccaccaagaaggccggccaggccaagaagaagaagtacccctacgacgtgcccgactacgccggctacccctacgacgtgcccgactacgccggctcctacccctacgacgtgcccgactacgccgccgcccccgccgccaagaagaagaagctggactagctagcaccagcctcaagaacacccgaatggagtctctaagctacataataccaacttacactttacaaaatgttgtcccccaaaatgtagccattcgtatctgctcctaataaaaagaaagtttcttcacattctctcgagaaaaaaaaaaaatggaaaaaaaaaaaacggaaaaaaaaaaaaggtaaaaaaaaaaaatataaaaaaaaaaaacataaaaaaaaaaaacgaaaaaaaaaaaacgtaaaaaaaaaaaactcaaaaaaaaaaaagataaaaaaaaaaaacctaaaaaaaaaaaatgtaaaaaaaaaaaagggaaaaaaaaaaaacgcaaaaaaaaaaaacacaaaaaaaaaaaatgcaaaaaaaaaaaatcgaaaaaaaaaaaatctaaaaaaaaaaaacgaaaaaaaaaaaacccaaaaaaaaaaaagacaaaaaaaaaaaatagaaaaaaaaaaaagttaaaaaaaaaaaactgaaaaaaaaaaaatttaaaaaaaaaaaatctag

SEQ ID NO: 172 - DNA, 3862 bp, synthetic construct
  source 1..3862: mol_type = other DNA
gggaagctcagaataaacgctcaactttggccggatctgccaccatggccgccttcaagcccaaccccatcaactacatcctgggcctggacatcggcatcgcctccgtgggctgggccatggtggagatcgacgaggaggagaaccccatccggctgatcgacctgggcgtgcgggtgttcgagcgggccgaggtgcccaagaccggcgactccctggccatggcccggcggctggcccggtccgtgcggcggctgacccggcggcgggcccaccggctgctgcgggcccggcggctgctgaagcgggagggcgtgctgcaggccgccgacttcgacgagaacggcctgatcaagtccctgcccaacaccccctggcagctgcgggccgccgccctggaccggaagctgacccccctggagtggtccgccgtgctgctgcacctgatcaagcaccggggctacctgtcccagcggaagaacgagggcgagaccgccgacaaggagctgggcgccctgctgaagggcgtggccaacaacgcccacgccctgcagaccggcgacttccggacccccgccgagctggccctgaacaagttcgagaaggagtccggccacatccggaaccagcggggcgactactcccacaccttctcccggaaggacctgcaggccgagctgatcctgctgttcgagaagcagaaggagttcggcaacccccacgtgtccggcggcctgaaggagggcatcgagaccctgctgatgacccagcggcccgccctgtccggcgacgccgtgcagaagatgctgggccactgcaccttcgagcccgccgagcccaaggccgccaagaacacctacaccgccgagcggttcatctggctgaccaagctgaacaacctgcggatcctggagcagggctccgagcggcccctgaccgacaccgagcgggccaccctgatggacgagccctaccggaagtccaagctgacctacgcccaggcccggaagctgctgggcctggaggacaccgccttcttcaagggcctgcggtacggcaaggacaacgccgaggcctccaccctgatggagatgaaggcctaccacgccatctcccgggccctggagaaggagggcctgaaggacaagaagtcccccctgaacctgtcctccgagctgcaggacgagatcggcaccgccttctccctgttcaagaccgacgaggacatcaccggccggctgaaggaccgggtgcagcccgagatcctggaggccctgctgaagcacatctccttcgacaagttcgtgcagatctccctgaaggccctgcggcggatcgtgcccctgatggagcagggcaagcggtacgacgaggcctgcgccgagatctacggcgaccactacggcaagaagaacaccgaggagaagatctacctgccccccatccccgccgacgagatccggaaccccgtggtgctgcgggccctgtcccaggcccggaaggtgatcaacggcgtggtgcggcggtacggctcccccgcccggatccacatcgagaccgcccgggaggtgggcaagtccttcaaggaccggaaggagatcgagaagcggcaggaggagaaccggaaggaccgggagaaggccgccgccaagttccgggagtacttccccaacttcgtgggcgagcccaagtccaaggacatcctgaagctgcggctgtacgagcagcagcacggcaagtgcctgtactccggcaaggagatcaacctggtgcggctgaacgagaagggctacgtggagatcgaccacgccctgcccttctcccggacctgggacgactccttcaacaacaaggtgctggtgctgggctccgagaaccagaacaagggcaaccagaccccctacgagtacttcaacggcaaggacaactcccgggagtggcaggagttcaaggcccgggtggagacctcccggttcccccggtccaagaagcagcggatcctgctgcagaagttcgacgaggacggcttcaaggagtgcaacctgaacgacacccggtacgtgaaccggttcctgtgccagttcgtggccgaccacatcctgctgaccggcaagggcaagcggcgggtgttcgcctccaacggccagatcaccaacctgctgcggggcttctggggcctgcggaaggtgcgggccgagaacgaccggcaccacgccctggacgccgtggtggtggcctgctccaccgtggccatgcagcagaagatcacccggttcgtgcggtacaaggagatgaacgccttcgacggcaagaccatcgacaaggagaccggcaaggtgctgcaccagaagacccacttcccccagccctgggagttcttcgcccaggaggtgatgatccgggtgttcggcaagcccgacggcaagcccgagttcgaggaggccgacacccccgagaagctgcggaccctgctggccgagaagctgtcctcccggcccgaggccgtgcacgagtacgtgacccccctgttcgtgtcccgggcccccaaccggaagatgtccggcgcccacaaggacaccctgcggtccgccaagcggttcgtgaagcacaacgagaagatctccgtgaagcgggtgtggctgaccgagatcaagctggccgacctggagaacatggtgaactacaagaacggccgggagatcgagctgtacgaggccctgaaggcccggctggaggcctacggcggcaacgccaagcaggccttcgaccccaaggacaaccccttctacaagaagggcggccagctggtgaaggccgtgcgggtggagaagacccaggagtccggcgtgctgctgaacaagaagaacgcctacaccatcgccgacaacggcgacatggtgcgggtggacgtgttctgcaaggtggacaagaagggcaagaaccagtacttcatcgtgcccatctacgcctggcaggtggccgagaacatcctgcccgacatcgactgcaagggctaccggatcgacgactcctacaccttctgcttctccctgcacaagtacgacctgatcgccttccagaaggacgagaagtccaaggtggagttcgcctactacatcaactgcgactcctccaacggccggttctacctggcctggcacgacaagggctccaaggagcagcagttccggatctccacccagaacctggtgctgatccagaagtaccaggtgaacgagctgggcaaggagatccggccctgccggctgaagaagcggccccccgtgcggtccggaaagcggaccgccgacggctccggaggaggaagccccaagaagaagcggaaggtgtagctagcaccagcctcaagaacacccgaatggagtctctaagctacataataccaacttacactttacaaaatgttgtcccccaaaatgtagccattcgtatctgctcctaataaaaagaaagtttcttcacattctctcgagaaaaaaaaaaaatggaaaaaaaaaaaacggaaaaaaaaaaaaggtaaaaaaaaaaaatataaaaaaaaaaaacataaaaaaaaaaaacgaaaaaaaaaaaacgtaaaaaaaaaaactcaaaaaaaaaaagataaaaaaaaaaaacctaaaaaaaaaaaatgtaaaaaaaaaaaagggaaaaaaaaaaaacgcaaaaaaaaaaaacacaaaaaaaaaaaatgcaaaaaaaaaaaatcgaaaaaaaaaaaatctaaaaaaaaaaaacgaaaaaaaaaaaacccaaaaaaaaaaaagacaaaaaaaaaaaatagaaaaaaaaaaagttaaaaaaaaaaaactgaaaaaaaaaaaatttaaaaaaaaaaaat

SEQ ID NO: 173 - DNA, 3863 bp, synthetic construct
  source 1..3863: mol_type = other DNA
gggaagctcagaataaacgctcaactttggccggatctgccaccatggacggctccggcggcggctcccccaagaagaagcggaaggtgggcggctccggcggcggcgccgccttcaagcccaaccccatcaactacatcctgggcctggacatcggcatcgcctccgtgggctgggccatggtggagatcgacgaggaggagaaccccatccggctgatcgacctgggcgtgcgggtgttcgagcgggccgaggtgcccaagaccggcgactccctggccatggcccggcggctggcccggtccgtgcggcggctgacccggcggcgggcccaccggctgctgcgggcccggcggctgctgaagcgggagggcgtgctgcaggccgccgacttcgacgagaacggcctgatcaagtccctgcccaacaccccctggcagctgcgggccgccgccctggaccggaagctgacccccctggagtggtccgccgtgctgctgcacctgatcaagcaccggggctacctgtcccagcggaagaacgagggcgagaccgccgacaaggagctgggcgccctgctgaagggcgtggccaacaacgcccacgccctgcagaccggcgacttccggacccccgccgagctggccctgaacaagttcgagaaggagtccggccacatccggaaccagcggggcgactactcccacaccttctcccggaaggacctgcaggccgagctgatcctgctgttcgagaagcagaaggagttcggcaacccccacgtgtccggcggcctgaaggagggcatcgagaccctgctgatgacccagcggcccgccctgtccggcgacgccgtgcagaagatgctgggccactgcaccttcgagcccgccgagcccaaggccgccaagaacacctacaccgccgagcggttcatctggctgaccaagctgaacaacctgcggatcctggagcagggctccgagcggcccctgaccgacaccgagcgggccaccctgatggacgagccctaccggaagtccaagctgacctacgcccaggcccggaagctgctgggcctggaggacaccgccttcttcaagggcctgcggtacggcaaggacaacgccgaggcctccaccctgatggagatgaaggcctaccacgccatctcccgggccctggagaaggagggcctgaaggacaagaagtcccccctgaacctgtcctccgagctgcaggacgagatcggcaccgccttctccctgttcaagaccgacgaggacatcaccggccggctgaaggaccgggtgcagcccgagatcctggaggccctgctgaagcacatctccttcgacaagttcgtgcagatctccctgaaggccctgcggcggatcgtgcccctgatggagcagggcaagcggtacgacgaggcctgcgccgagatctacggcgaccactacggcaagaagaacaccgaggagaagatctacctgccccccatccccgccgacgagatccggaaccccgtggtgctgcgggccctgtcccaggcccggaaggtgatcaacggcgtggtgcggcggtacggctcccccgcccggatccacatcgagaccgcccgggaggtgggcaagtccttcaaggaccggaaggagatcgagaagcggcaggaggagaaccggaaggaccgggagaaggccgccgccaagttccgggagtacttccccaacttcgtgggcgagcccaagtccaaggacatcctgaagctgcggctgtacgagcagcagcacggcaagtgcctgtactccggcaaggagatcaacctggtgcggctgaacgagaagggctacgtggagatcgaccacgccctgcccttctcccggacctgggacgactccttcaacaacaaggtgctggtgctgggctccgagaaccagaacaagggcaaccagaccccctacgagtacttcaacggcaaggacaactcccgggagtggcaggagttcaaggcccgggtggagacctcccggttcccccggtccaagaagcagcggatcctgctgcagaagttcgacgaggacggcttcaaggagtgcaacctgaacgacacccggtacgtgaaccggttcctgtgccagttcgtggccgaccacatcctgctgaccggcaagggcaagcggcgggtgttcgcctccaacggccagatcaccaacctgctgcggggcttctggggcctgcggaaggtgcgggccgagaacgaccggcaccacgccctggacgccgtggtggtggcctgctccaccgtggccatgcagcagaagatcacccggttcgtgcggtacaaggagatgaacgccttcgacggcaagaccatcgacaaggagaccggcaaggtgctgcaccagaagacccacttcccccagccctgggagttcttcgcccaggaggtgatgatccgggtgttcggcaagcccgacggcaagcccgagttcgaggaggccgacacccccgagaagctgcggaccctgctggccgagaagctgtcctcccggcccgaggccgtgcacgagtacgtgacccccctgttcgtgtcccgggcccccaaccggaagatgtccggcgcccacaaggacaccctgcggtccgccaagcggttcgtgaagcacaacgagaagatctccgtgaagcgggtgtggctgaccgagatcaagctggccgacctggagaacatggtgaactacaagaacggccgggagatcgagctgtacgaggccctgaaggcccggctggaggcctacggcggcaacgccaagcaggccttcgaccccaaggacaaccccttctacaagaagggcggccagctggtgaaggccgtgcgggtggagaagacccaggagtccggcgtgctgctgaacaagaagaacgcctacaccatcgccgacaacggcgacatggtgcgggtggacgtgttctgcaaggtggacaagaagggcaagaaccagtacttcatcgtgcccatctacgcctggcaggtggccgagaacatcctgcccgacatcgactgcaagggctaccggatcgacgactcctacaccttctgcttctccctgcacaagtacgacctgatcgccttccagaaggacgagaagtccaaggtggagttcgcctactacatcaactgcgactcctccaacggccggttctacctggcctggcacgacaagggctccaaggagcagcagttccggatctccacccagaacctggtgctgatccagaagtaccaggtgaacgagctgggcaaggagatccggccctgccggctgaagaagcggccccccgtgcggtagctagcaccagcctcaagaacacccgaatggagtctctaagctacataataccaacttacactttacaaaatgttgtcccccaaaatgtagccattcgtatctgctcctaataaaaagaaagtttcttcacattctctcgagaaaaaaaaaaaatggaaaaaaaaaaaacggaaaaaaaaaaaaggtaaaaaaaaaaaatataaaaaaaaaaaacataaaaaaaaaaaacgaaaaaaaaaaaacgtaaaaaaaaaaaactcaaaaaaaaaaagataaaaaaaaaaaacctaaaaaaaaaaaatgtaaaaaaaaaaaagggaaaaaaaaaaaacgcaaaaaaaaaaaacacaaaaaaaaaaaatgcaaaaaaaaaaaatcgaaaaaaaaaaaatctaaaaaaaaaaaacgaaaaaaaaaaaacccaaaaaaaaaaaagacaaaaaaaaaaaatagaaaaaaaaaaagttaaaaaaaaaaaactgaaaaaaaaaaaatttaaaaaaaaaaaat

SEQ ID NO: 174 - RNA, 3926 nt, synthetic construct
  source 1..3926: mol_type = other RNA
gggaagctcagaataaacgctcaactttggccggatctgccaccatggacggctccggcggcggctcccccaagaagaagcggaaggtgggcggctccggcggcggcgccgccttcaagcccaaccccatcaactacatcctgggcctggacatcggcatcgcctccgtgggctgggccatggtggagatcgacgaggaggagaaccccatccggctgatcgacctgggcgtgcgggtgttcgagcgggccgaggtgcccaagaccggcgactccctggccatggcccggcggctggcccggtccgtgcggcggctgacccggcggcgggcccaccggctgctgcgggcccggcggctgctgaagcgggagggcgtgctgcaggccgccgacttcgacgagaacggcctgatcaagtccctgcccaacaccccctggcagctgcgggccgccgccctggaccggaagctgacccccctggagtggtccgccgtgctgctgcacctgatcaagcaccggggctacctgtcccagcggaagaacgagggcgagaccgccgacaaggagctgggcgccctgctgaagggcgtggccaacaacgcccacgccctgcagaccggcgacttccggacccccgccgagctggccctgaacaagttcgagaaggagtccggccacatccggaaccagcggggcgactactcccacaccttctcccggaaggacctgcaggccgagctgatcctgctgttcgagaagcagaaggagttcggcaacccccacgtgtccggcggcctgaaggagggcatcgagaccctgctgatgacccagcggcccgccctgtccggcgacgccgtgcagaagatgctgggccactgcaccttcgagcccgccgagcccaaggccgccaagaacacctacaccgccgagcggttcatctggctgaccaagctgaacaacctgcggatcctggagcagggctccgagcggcccctgaccgacaccgagcgggccaccctgatggacgagccctaccggaagtccaagctgacctacgcccaggcccggaagctgctgggcctggaggacaccgccttcttcaagggcctgcggtacggcaaggacaacgccgaggcctccaccctgatggagatgaaggcctaccacgccatctcccgggccctggagaaggagggcctgaaggacaagaagtcccccctgaacctgtcctccgagctgcaggacgagatcggcaccgccttctccctgttcaagaccgacgaggacatcaccggccggctgaaggaccgggtgcagcccgagatcctggaggccctgctgaagcacatctccttcgacaagttcgtgcagatctccctgaaggccctgcggcggatcgtgcccctgatggagcagggcaagcggtacgacgaggcctgcgccgagatctacggcgaccactacggcaagaagaacaccgaggagaagatctacctgccccccatccccgccgacgagatccggaaccccgtggtgctgcgggccctgtcccaggcccggaaggtgatcaacggcgtggtgcggcggtacggctcccccgcccggatccacatcgagaccgcccgggaggtgggcaagtccttcaaggaccggaaggagatcgagaagcggcaggaggagaaccggaaggaccgggagaaggccgccgccaagttccgggagtacttccccaacttcgtgggcgagcccaagtccaaggacatcctgaagctgcggctgtacgagcagcagcacggcaagtgcctgtactccggcaaggagatcaacctggtgcggctgaacgagaagggctacgtggagatcgaccacgccctgcccttctcccggacctgggacgactccttcaacaacaaggtgctggtgctgggctccgagaaccagaacaagggcaaccagaccccctacgagtacttcaacggcaaggacaactcccgggagtggcaggagttcaaggcccgggtggagacctcccggttcccccggtccaagaagcagcggatcctgctgcagaagttcgacgaggacggcttcaaggagtgcaacctgaacgacacccggtacgtgaaccggttcctgtgccagttcgtggccgaccacatcctgctgaccggcaagggcaagcggcgggtgttcgcctccaacggccagatcaccaacctgctgcggggcttctggggcctgcggaaggtgcgggccgagaacgaccggcaccacgccctggacgccgtggtggtggcctgctccaccgtggccatgcagcagaagatcacccggttcgtgcggtacaaggagatgaacgccttcgacggcaagaccatcgacaaggagaccggcaaggtgctgcaccagaagacccacttcccccagccctgggagttcttcgcccaggaggtgatgatccgggtgttcggcaagcccgacggcaagcccgagttcgaggaggccgacacccccgagaagctgcggaccctgctggccgagaagctgtcctcccggcccgaggccgtgcacgagtacgtgacccccctgttcgtgtcccgggcccccaaccggaagatgtccggcgcccacaaggacaccctgcggtccgccaagcggttcgtgaagcacaacgagaagatctccgtgaagcgggtgtggctgaccgagatcaagctggccgacctggagaacatggtgaactacaagaacggccgggagatcgagctgtacgaggccctgaaggcccggctggaggcctacggcggcaacgccaagcaggccttcgaccccaaggacaaccccttctacaagaagggcggccagctggtgaaggccgtgcgggtggagaagacccaggagtccggcgtgctgctgaacaagaagaacgcctacaccatcgccgacaacggcgacatggtgcgggtggacgtgttctgcaaggtggacaagaagggcaagaaccagtacttcatcgtgcccatctacgcctggcaggtggccgagaacatcctgcccgacatcgactgcaagggctaccggatcgacgactcctacaccttctgcttctccctgcacaagtacgacctgatcgccttccagaaggacgagaagtccaaggtggagttcgcctactacatcaactgcgactcctccaacggccggttctacctggcctggcacgacaagggctccaaggagcagcagttccggatctccacccagaacctggtgctgatccagaagtaccaggtgaacgagctgggcaaggagatccggccctgccggctgaagaagcggccccccgtgcggtccgagtccgccacccccgagtccgtgtccggctggcggctgttcaagaagatctcctagctagcaccagcctcaagaacacccgaatggagtctctaagctacataataccaacttacactttacaaaatgttgtcccccaaaatgtagccattcgtatctgctcctaataaaaagaaagtttcttcacattctctcgagaaaaaaaaaaaatggaaaaaaaaaaaacggaaaaaaaaaaaaggtaaaaaaaaaaaatataaaaaaaaaaaacataaaaaaaaaaaacgaaaaaaaaaaaacgtaaaaaaaaaaaactcaaaaaaaaaaaagataaaaaaaaaaaacctaaaaaaaaaaaatgtaaaaaaaaaaaagggaaaaaaaaaaaacgcaaaaaaaaaaaacacaaaaaaaaaaaatgcaaaaaaaaaaaatcgaaaaaaaaaaaatctaaaaaaaaaaaacgaaaaaaaaaaaacccaaaaaaaaaaaagacaaaaaaaaaaaatagaaaaaaaaaaaagttaaaaaaaaaaaactgaaaaaaaaaaaatttaaaaaaaaaaaatctag

SEQ ID NO: 175 - RNA, 3933 nt, synthetic construct
  source 1..3933: mol_type = other RNA
gggaagctcagaataaacgctcaactttggccggatctgccaccatggacggctccggcggcggctcccccaagaagaagcggaaggtgggcggctccggcggcggcgccgccttcaagcccaaccccatcaactacatcctgggcctggacatcggcatcgcctccgtgggctgggccatggtggagatcgacgaggaggagaaccccatccggctgatcgacctgggcgtgcgggtgttcgagcgggccgaggtgcccaagaccggcgactccctggccatggcccggcggctggcccggtccgtgcggcggctgacccggcggcgggcccaccggctgctgcgggcccggcggctgctgaagcgggagggcgtgctgcaggccgccgacttcgacgagaacggcctgatcaagtccctgcccaacaccccctggcagctgcgggccgccgccctggaccggaagctgacccccctggagtggtccgccgtgctgctgcacctgatcaagcaccggggctacctgtcccagcggaagaacgagggcgagaccgccgacaaggagctgggcgccctgctgaagggcgtggccaacaacgcccacgccctgcagaccggcgacttccggacccccgccgagctggccctgaacaagttcgagaaggagtccggccacatccggaaccagcggggcgactactcccacaccttctcccggaaggacctgcaggccgagctgatcctgctgttcgagaagcagaaggagttcggcaacccccacgtgtccggcggcctgaaggagggcatcgagaccctgctgatgacccagcggcccgccctgtccggcgacgccgtgcagaagatgctgggccactgcaccttcgagcccgccgagcccaaggccgccaagaacacctacaccgccgagcggttcatctggctgaccaagctgaacaacctgcggatcctggagcagggctccgagcggcccctgaccgacaccgagcgggccaccctgatggacgagccctaccggaagtccaagctgacctacgcccaggcccggaagctgctgggcctggaggacaccgccttcttcaagggcctgcggtacggcaaggacaacgccgaggcctccaccctgatggagatgaaggcctaccacgccatctcccgggccctggagaaggagggcctgaaggacaagaagtcccccctgaacctgtcctccgagctgcaggacgagatcggcaccgccttctccctgttcaagaccgacgaggacatcaccggccggctgaaggaccgggtgcagcccgagatcctggaggccctgctgaagcacatctccttcgacaagttcgtgcagatctccctgaaggccctgcggcggatcgtgcccctgatggagcagggcaagcggtacgacgaggcctgcgccgagatctacggcgaccactacggcaagaagaacaccgaggagaagatctacctgccccccatccccgccgacgagatccggaaccccgtggtgctgcgggccctgtcccaggcccggaaggtgatcaacggcgtggtgcggcggtacggctcccccgcccggatccacatcgagaccgcccgggaggtgggcaagtccttcaaggaccggaaggagatcgagaagcggcaggaggagaaccggaaggaccgggagaaggccgccgccaagttccgggagtacttccccaacttcgtgggcgagcccaagtccaaggacatcctgaagctgcggctgtacgagcagcagcacggcaagtgcctgtactccggcaaggagatcaacctggtgcggctgaacgagaagggctacgtggagatcgaccacgccctgcccttctcccggacctgggacgactccttcaacaacaaggtgctggtgctgggctccgagaaccagaacaagggcaaccagaccccctacgagtacttcaacggcaaggacaactcccgggagtggcaggagttcaaggcccgggtggagacctcccggttcccccggtccaagaagcagcggatcctgctgcagaagttcgacgaggacggcttcaaggagtgcaacctgaacgacacccggtacgtgaaccggttcctgtgccagttcgtggccgaccacatcctgctgaccggcaagggcaagcggcgggtgttcgcctccaacggccagatcaccaacctgctgcggggcttctggggcctgcggaaggtgcgggccgagaacgaccggcaccacgccctggacgccgtggtggtggcctgctccaccgtggccatgcagcagaagatcacccggttcgtgcggtacaaggagatgaacgccttcgacggcaagaccatcgacaaggagaccggcaaggtgctgcaccagaagacccacttcccccagccctgggagttcttcgcccaggaggtgatgatccgggtgttcggcaagcccgacggcaagcccgagttcgaggaggccgacacccccgagaagctgcggaccctgctggccgagaagctgtcctcccggcccgaggccgtgcacgagtacgtgacccccctgttcgtgtcccgggcccccaaccggaagatgtccggcgcccacaaggacaccctgcggtccgccaagcggttcgtgaagcacaacgagaagatctccgtgaagcgggtgtggctgaccgagatcaagctggccgacctggagaacatggtgaactacaagaacggccgggagatcgagctgtacgaggccctgaaggcccggctggaggcctacggcggcaacgccaagcaggccttcgaccccaaggacaaccccttctacaagaagggcggccagctggtgaaggccgtgcgggtggagaagacccaggagtccggcgtgctgctgaacaagaagaacgcctacaccatcgccgacaacggcgacatggtgcgggtggacgtgttctgcaaggtggacaagaagggcaagaaccagtacttcatcgtgcccatctacgcctggcaggtggccgagaacatcctgcccgacatcgactgcaagggctaccggatcgacgactcctacaccttctgcttctccctgcacaagtacgacctgatcgccttccagaaggacgagaagtccaaggtggagttcgcctactacatcaactgcgactcctccaacggccggttctacctggcctggcacgacaagggctccaaggagcagcagttccggatctccacccagaacctggtgctgatccagaagtaccaggtgaacgagctgggcaaggagatccggccctgccggctgaagaagcggccccccgtgcggtccggaaagcggaccgccgacggctccggaggaggaagccccgccgccaagaagaagaagctggactagctagcaccagcctcaagaacacccgaatggagtctctaagctacataataccaacttacactttacaaaatgttgtcccccaaaatgtagccattcgtatctgctcctaataaaaagaaagtttcttcacattctctcgagaaaaaaaaaaaatggaaaaaaaaaaaacggaaaaaaaaaaaaggtaaaaaaaaaaaatataaaaaaaaaaaacataaaaaaaaaaaacgaaaaaaaaaaaacgtaaaaaaaaaaaactcaaaaaaaaaaagataaaaaaaaaaaacctaaaaaaaaaaaatgtaaaaaaaaaaaagggaaaaaaaaaaaacgcaaaaaaaaaaaacacaaaaaaaaaaaatgcaaaaaaaaaaaatcgaaaaaaaaaaaatctaaaaaaaaaaaacgaaaaaaaaaaaacccaaaaaaaaaaaagacaaaaaaaaaaaatagaaaaaaaaaaagttaaaaaaaaaaaactgaaaaaaaaaaaatttaaaaaaaaaaaatctag

SEQ ID NO: 176 - RNA, 3921 nt, synthetic construct
  source 1..3921: mol_type = other RNA
gggaagctcagaataaacgctcaactttggccggatctgccaccatggacggctccggcggcggctcccccaagaagaagcggaaggtggaggacaagcggcccgccgccaccaagaaggccggccaggccaagaagaagaagggcggctccggcggcggcgccgccttcaagcccaaccccatcaactacatcctgggcctggacatcggcatcgcctccgtgggctgggccatggtggagatcgacgaggaggagaaccccatccggctgatcgacctgggcgtgcgggtgttcgagcgggccgaggtgcccaagaccggcgactccctggccatggcccggcggctggcccggtccgtgcggcggctgacccggcggcgggcccaccggctgctgcgggcccggcggctgctgaagcgggagggcgtgctgcaggccgccgacttcgacgagaacggcctgatcaagtccctgcccaacaccccctggcagctgcgggccgccgccctggaccggaagctgacccccctggagtggtccgccgtgctgctgcacctgatcaagcaccggggctacctgtcccagcggaagaacgagggcgagaccgccgacaaggagctgggcgccctgctgaagggcgtggccaacaacgcccacgccctgcagaccggcgacttccggacccccgccgagctggccctgaacaagttcgagaaggagtccggccacatccggaaccagcggggcgactactcccacaccttctcccggaaggacctgcaggccgagctgatcctgctgttcgagaagcagaaggagttcggcaacccccacgtgtccggcggcctgaaggagggcatcgagaccctgctgatgacccagcggcccgccctgtccggcgacgccgtgcagaagatgctgggccactgcaccttcgagcccgccgagcccaaggccgccaagaacacctacaccgccgagcggttcatctggctgaccaagctgaacaacctgcggatcctggagcagggctccgagcggcccctgaccgacaccgagcgggccaccctgatggacgagccctaccggaagtccaagctgacctacgcccaggcccggaagctgctgggcctggaggacaccgccttcttcaagggcctgcggtacggcaaggacaacgccgaggcctccaccctgatggagatgaaggcctaccacgccatctcccgggccctggagaaggagggcctgaaggacaagaagtcccccctgaacctgtcctccgagctgcaggacgagatcggcaccgccttctccctgttcaagaccgacgaggacatcaccggccggctgaaggaccgggtgcagcccgagatcctggaggccctgctgaagcacatctccttcgacaagttcgtgcagatctccctgaaggccctgcggcggatcgtgcccctgatggagcagggcaagcggtacgacgaggcctgcgccgagatctacggcgaccactacggcaagaagaacaccgaggagaagatctacctgccccccatccccgccgacgagatccggaaccccgtggtgctgcgggccctgtcccaggcccggaaggtgatcaacggcgtggtgcggcggtacggctcccccgcccggatccacatcgagaccgcccgggaggtgggcaagtccttcaaggaccggaaggagatcgagaagcggcaggaggagaaccggaaggaccgggagaaggccgccgccaagttccgggagtacttccccaacttcgtgggcgagcccaagtccaaggacatcctgaagctgcggctgtacgagcagcagcacggcaagtgcctgtactccggcaaggagatcaacctggtgcggctgaacgagaagggctacgtggagatcgaccacgccctgcccttctcccggacctgggacgactccttcaacaacaaggtgctggtgctgggctccgagaaccagaacaagggcaaccagaccccctacgagtacttcaacggcaaggacaactcccgggagtggcaggagttcaaggcccgggtggagacctcccggttcccccggtccaagaagcagcggatcctgctgcagaagttcgacgaggacggcttcaaggagtgcaacctgaacgacacccggtacgtgaaccggttcctgtgccagttcgtggccgaccacatcctgctgaccggcaagggcaagcggcgggtgttcgcctccaacggccagatcaccaacctgctgcggggcttctggggcctgcggaaggtgcgggccgagaacgaccggcaccacgccctggacgccgtggtggtggcctgctccaccgtggccatgcagcagaagatcacccggttcgtgcggtacaaggagatgaacgccttcgacggcaagaccatcgacaaggagaccggcaaggtgctgcaccagaagacccacttcccccagccctgggagttcttcgcccaggaggtgatgatccgggtgttcggcaagcccgacggcaagcccgagttcgaggaggccgacacccccgagaagctgcggaccctgctggccgagaagctgtcctcccggcccgaggccgtgcacgagtacgtgacccccctgttcgtgtcccgggcccccaaccggaagatgtccggcgcccacaaggacaccctgcggtccgccaagcggttcgtgaagcacaacgagaagatctccgtgaagcgggtgtggctgaccgagatcaagctggccgacctggagaacatggtgaactacaagaacggccgggagatcgagctgtacgaggccctgaaggcccggctggaggcctacggcggcaacgccaagcaggccttcgaccccaaggacaaccccttctacaagaagggcggccagctggtgaaggccgtgcgggtggagaagacccaggagtccggcgtgctgctgaacaagaagaacgcctacaccatcgccgacaacggcgacatggtgcgggtggacgtgttctgcaaggtggacaagaagggcaagaaccagtacttcatcgtgcccatctacgcctggcaggtggccgagaacatcctgcccgacatcgactgcaagggctaccggatcgacgactcctacaccttctgcttctccctgcacaagtacgacctgatcgccttccagaaggacgagaagtccaaggtggagttcgcctactacatcaactgcgactcctccaacggccggttctacctggcctggcacgacaagggctccaaggagcagcagttccggatctccacccagaacctggtgctgatccagaagtaccaggtgaacgagctgggcaaggagatccggccctgccggctgaagaagcggccccccgtgcggtagctagcaccagcctcaagaacacccgaatggagtctctaagctacataataccaacttacactttacaaaatgttgtcccccaaaatgtagccattcgtatctgctcctaataaaaagaaagtttcttcacattctctcgagaaaaaaaaaaaatggaaaaaaaaaaaacggaaaaaaaaaaaaggtaaaaaaaaaaaatataaaaaaaaaaaacataaaaaaaaaaaacgaaaaaaaaaaaacgtaaaaaaaaaaaactcaaaaaaaaaaagataaaaaaaaaaaacctaaaaaaaaaaaatgtaaaaaaaaaaaagggaaaaaaaaaaaacgcaaaaaaaaaaaacacaaaaaaaaaaaatgcaaaaaaaaaaaatcgaaaaaaaaaaaatctaaaaaaaaaaaacgaaaaaaaaaaaacccaaaaaaaaaaaagacaaaaaaaaaaaatagaaaaaaaaaaagttaaaaaaaaaaaactgaaaaaaaaaaaatttaaaaaaaaaaaatctag

SEQ ID NO: 177 - RNA, 3980 nt, synthetic construct
  source 1..3980: mol_type = other RNA
gggaagctcagaataaacgctcaactttggccggatctgccaccatggacggctccggcggcggctcccccaagaagaagcggaaggtggaggacaagcggcccgccgccaccaagaaggccggccaggccaagaagaagaagggcggctccggcggcggcgccgccttcaagcccaaccccatcaactacatcctgggcctggacatcggcatcgcctccgtgggctgggccatggtggagatcgacgaggaggagaaccccatccggctgatcgacctgggcgtgcgggtgttcgagcgggccgaggtgcccaagaccggcgactccctggccatggcccggcggctggcccggtccgtgcggcggctgacccggcggcgggcccaccggctgctgcgggcccggcggctgctgaagcgggagggcgtgctgcaggccgccgacttcgacgagaacggcctgatcaagtccctgcccaacaccccctggcagctgcgggccgccgccctggaccggaagctgacccccctggagtggtccgccgtgctgctgcacctgatcaagcaccggggctacctgtcccagcggaagaacgagggcgagaccgccgacaaggagctgggcgccctgctgaagggcgtggccaacaacgcccacgccctgcagaccggcgacttccggacccccgccgagctggccctgaacaagttcgagaaggagtccggccacatccggaaccagcggggcgactactcccacaccttctcccggaaggacctgcaggccgagctgatcctgctgttcgagaagcagaaggagttcggcaacccccacgtgtccggcggcctgaaggagggcatcgagaccctgctgatgacccagcggcccgccctgtccggcgacgccgtgcagaagatgctgggccactgcaccttcgagcccgccgagcccaaggccgccaagaacacctacaccgccgagcggttcatctggctgaccaagctgaacaacctgcggatcctggagcagggctccgagcggcccctgaccgacaccgagcgggccaccctgatggacgagccctaccggaagtccaagctgacctacgcccaggcccggaagctgctgggcctggaggacaccgccttcttcaagggcctgcggtacggcaaggacaacgccgaggcctccaccctgatggagatgaaggcctaccacgccatctcccgggccctggagaaggagggcctgaaggacaagaagtcccccctgaacctgtcctccgagctgcaggacgagatcggcaccgccttctccctgttcaagaccgacgaggacatcaccggccggctgaaggaccgggtgcagcccgagatcctggaggccctgctgaagcacatctccttcgacaagttcgtgcagatctccctgaaggccctgcggcggatcgtgcccctgatggagcagggcaagcggtacgacgaggcctgcgccgagatctacggcgaccactacggcaagaagaacaccgaggagaagatctacctgccccccatccccgccgacgagatccggaaccccgtggtgctgcgggccctgtcccaggcccggaaggtgatcaacggcgtggtgcggcggtacggctcccccgcccggatccacatcgagaccgcccgggaggtgggcaagtccttcaaggaccggaaggagatcgagaagcggcaggaggagaaccggaaggaccgggagaaggccgccgccaagttccgggagtacttccccaacttcgtgggcgagcccaagtccaaggacatcctgaagctgcggctgtacgagcagcagcacggcaagtgcctgtactccggcaaggagatcaacctggtgcggctgaacgagaagggctacgtggagatcgaccacgccctgcccttctcccggacctgggacgactccttcaacaacaaggtgctggtgctgggctccgagaaccagaacaagggcaaccagaccccctacgagtacttcaacggcaaggacaactcccgggagtggcaggagttcaaggcccgggtggagacctcccggttcccccggtccaagaagcagcggatcctgctgcagaagttcgacgaggacggcttcaaggagtgcaacctgaacgacacccggtacgtgaaccggttcctgtgccagttcgtggccgaccacatcctgctgaccggcaagggcaagcggcgggtgttcgcctccaacggccagatcaccaacctgctgcggggcttctggggcctgcggaaggtgcgggccgagaacgaccggcaccacgccctggacgccgtggtggtggcctgctccaccgtggccatgcagcagaagatcacccggttcgtgcggtacaaggagatgaacgccttcgacggcaagaccatcgacaaggagaccggcaaggtgctgcaccagaagacccacttcccccagccctgggagttcttcgcccaggaggtgatgatccgggtgttcggcaagcccgacggcaagcccgagttcgaggaggccgacacccccgagaagctgcggaccctgctggccgagaagctgtcctcccggcccgaggccgtgcacgagtacgtgacccccctgttcgtgtcccgggcccccaaccggaagatgtccggcgcccacaaggacaccctgcggtccgccaagcggttcgtgaagcacaacgagaagatctccgtgaagcgggtgtggctgaccgagatcaagctggccgacctggagaacatggtgaactacaagaacggccgggagatcgagctgtacgaggccctgaaggcccggctggaggcctacggcggcaacgccaagcaggccttcgaccccaaggacaaccccttctacaagaagggcggccagctggtgaaggccgtgcgggtggagaagacccaggagtccggcgtgctgctgaacaagaagaacgcctacaccatcgccgacaacggcgacatggtgcgggtggacgtgttctgcaaggtggacaagaagggcaagaaccagtacttcatcgtgcccatctacgcctggcaggtggccgagaacatcctgcccgacatcgactgcaagggctaccggatcgacgactcctacaccttctgcttctccctgcacaagtacgacctgatcgccttccagaaggacgagaagtccaaggtggagttcgcctactacatcaactgcgactcctccaacggccggttctacctggcctggcacgacaagggctccaaggagcagcagttccggatctccacccagaacctggtgctgatccagaagtaccaggtgaacgagctgggcaaggagatccggccctgccggctgaagaagcggccccccgtgcggtccgagtccgccacccccgagtccgtgtccggctggcggctgttcaagaagatctcctagctagcaccagcctcaagaacacccgaatggagtctctaagctacataataccaacttacactttacaaaatgttgtcccccaaaatgtagccattcgtatctgctcctaataaaaagaaagtttcttcacattctctcgagaaaaaaaaaaaatggaaaaaaaaaaaacggaaaaaaaaaaaaggtaaaaaaaaaaaatataaaaaaaaaaaacataaaaaaaaaaaacgaaaaaaaaaaaacgtaaaaaaaaaaaactcaaaaaaaaaaaagataaaaaaaaaaaacctaaaaaaaaaaaatgtaaaaaaaaaaaagggaaaaaaaaaaaacgcaaaaaaaaaaaacacaaaaaaaaaaaatgcaaaaaaaaaaaatcgaaaaaaaaaaaatctaaaaaaaaaaaacgaaaaaaaaaaaacccaaaaaaaaaaaagacaaaaaaaaaaaatagaaaaaaaaaaaagttaaaaaaaaaaaactgaaaaaaaaaaaatttaaaaaaaaaaaatctag

SEQ ID NO: 178 - RNA, 3867 nt, synthetic construct
  source 1..3867: mol_type = other RNA
gggaagctcagaataaacgctcaactttggccggatctgccaccatggacggctccggcggcggctcccccaagaagaagcggaaggtgggcggctccggcggcggcgccgccttcaagcccaaccccatcaactacatcctgggcctggacatcggcatcgcctccgtgggctgggccatggtggagatcgacgaggaggagaaccccatccggctgatcgacctgggcgtgcgggtgttcgagcgggccgaggtgcccaagaccggcgactccctggccatggcccggcggctggcccggtccgtgcggcggctgacccggcggcgggcccaccggctgctgcgggcccggcggctgctgaagcgggagggcgtgctgcaggccgccgacttcgacgagaacggcctgatcaagtccctgcccaacaccccctggcagctgcgggccgccgccctggaccggaagctgacccccctggagtggtccgccgtgctgctgcacctgatcaagcaccggggctacctgtcccagcggaagaacgagggcgagaccgccgacaaggagctgggcgccctgctgaagggcgtggccaacaacgcccacgccctgcagaccggcgacttccggacccccgccgagctggccctgaacaagttcgagaaggagtccggccacatccggaaccagcggggcgactactcccacaccttctcccggaaggacctgcaggccgagctgatcctgctgttcgagaagcagaaggagttcggcaacccccacgtgtccggcggcctgaaggagggcatcgagaccctgctgatgacccagcggcccgccctgtccggcgacgccgtgcagaagatgctgggccactgcaccttcgagcccgccgagcccaaggccgccaagaacacctacaccgccgagcggttcatctggctgaccaagctgaacaacctgcggatcctggagcagggctccgagcggcccctgaccgacaccgagcgggccaccctgatggacgagccctaccggaagtccaagctgacctacgcccaggcccggaagctgctgggcctggaggacaccgccttcttcaagggcctgcggtacggcaaggacaacgccgaggcctccaccctgatggagatgaaggcctaccacgccatctcccgggccctggagaaggagggcctgaaggacaagaagtcccccctgaacctgtcctccgagctgcaggacgagatcggcaccgccttctccctgttcaagaccgacgaggacatcaccggccggctgaaggaccgggtgcagcccgagatcctggaggccctgctgaagcacatctccttcgacaagttcgtgcagatctccctgaaggccctgcggcggatcgtgcccctgatggagcagggcaagcggtacgacgaggcctgcgccgagatctacggcgaccactacggcaagaagaacaccgaggagaagatctacctgccccccatccccgccgacgagatccggaaccccgtggtgctgcgggccctgtcccaggcccggaaggtgatcaacggcgtggtgcggcggtacggctcccccgcccggatccacatcgagaccgcccgggaggtgggcaagtccttcaaggaccggaaggagatcgagaagcggcaggaggagaaccggaaggaccgggagaaggccgccgccaagttccgggagtacttccccaacttcgtgggcgagcccaagtccaaggacatcctgaagctgcggctgtacgagcagcagcacggcaagtgcctgtactccggcaaggagatcaacctggtgcggctgaacgagaagggctacgtggagatcgaccacgccctgcccttctcccggacctgggacgactccttcaacaacaaggtgctggtgctgggctccgagaaccagaacaagggcaaccagaccccctacgagtacttcaacggcaaggacaactcccgggagtggcaggagttcaaggcccgggtggagacctcccggttcccccggtccaagaagcagcggatcctgctgcagaagttcgacgaggacggcttcaaggagtgcaacctgaacgacacccggtacgtgaaccggttcctgtgccagttcgtggccgaccacatcctgctgaccggcaagggcaagcggcgggtgttcgcctccaacggccagatcaccaacctgctgcggggcttctggggcctgcggaaggtgcgggccgagaacgaccggcaccacgccctggacgccgtggtggtggcctgctccaccgtggccatgcagcagaagatcacccggttcgtgcggtacaaggagatgaacgccttcgacggcaagaccatcgacaaggagaccggcaaggtgctgcaccagaagacccacttcccccagccctgggagttcttcgcccaggaggtgatgatccgggtgttcggcaagcccgacggcaagcccgagttcgaggaggccgacacccccgagaagctgcggaccctgctggccgagaagctgtcctcccggcccgaggccgtgcacgagtacgtgacccccctgttcgtgtcccgggcccccaaccggaagatgtccggcgcccacaaggacaccctgcggtccgccaagcggttcgtgaagcacaacgagaagatctccgtgaagcgggtgtggctgaccgagatcaagctggccgacctggagaacatggtgaactacaagaacggccgggagatcgagctgtacgaggccctgaaggcccggctggaggcctacggcggcaacgccaagcaggccttcgaccccaaggacaaccccttctacaagaagggcggccagctggtgaaggccgtgcgggtggagaagacccaggagtccggcgtgctgctgaacaagaagaacgcctacaccatcgccgacaacggcgacatggtgcgggtggacgtgttctgcaaggtggacaagaagggcaagaaccagtacttcatcgtgcccatctacgcctggcaggtggccgagaacatcctgcccgacatcgactgcaagggctaccggatcgacgactcctacaccttctgcttctccctgcacaagtacgacctgatcgccttccagaaggacgagaagtccaaggtggagttcgcctactacatcaactgcgactcctccaacggccggttctacctggcctggcacgacaagggctccaaggagcagcagttccggatctccacccagaacctggtgctgatccagaagtaccaggtgaacgagctgggcaaggagatccggccctgccggctgaagaagcggccccccgtgcggtagctagcaccagcctcaagaacacccgaatggagtctctaagctacataataccaacttacactttacaaaatgttgtcccccaaaatgtagccattcgtatctgctcctaataaaaagaaagtttcttcacattctctcgagaaaaaaaaaaaatggaaaaaaaaaaaacggaaaaaaaaaaaaggtaaaaaaaaaaaatataaaaaaaaaaaacataaaaaaaaaaaacgaaaaaaaaaaaacgtaaaaaaaaaaaactcaaaaaaaaaaagataaaaaaaaaaaacctaaaaaaaaaaaatgtaaaaaaaaaaaagggaaaaaaaaaaaacgcaaaaaaaaaaaacacaaaaaaaaaaaatgcaaaaaaaaaaaatcgaaaaaaaaaaaatctaaaaaaaaaaaacgaaaaaaaaaaaacccaaaaaaaaaaaagacaaaaaaaaaaaatagaaaaaaaaaaagttaaaaaaaaaaaactgaaaaaaaaaaaatttaaaaaaaaaaaatctag

SEQ ID NO: 179 - RNA, 4563 nt, synthetic construct; identical to SEQ ID NO: 147
  source 1..4563: mol_type = other RNA

SEQ ID NO: 180 - DNA, 3318 bp, synthetic construct
  source 1..3318: mol_type = other DNA
atgaccggtgccgccttcaagcccaaccccatcaactacatcctgggcctggacatcggcatcgcctccgtgggctgggccatggtggagatcgacgaggaggagaaccccatccggctgatcgacctgggcgtgcgggtgttcgagcgggccgaggtgcccaagaccggcgactccctggccatggcccggcggctggcccggtccgtgcggcggctgacccggcggcgggcccaccggctgctgcgggcccggcggctgctgaagcgggagggcgtgctgcaggccgccgacttcgacgagaacggcctgatcaagtccctgcccaacaccccctggcagctgcgggccgccgccctggaccggaagctgacccccctggagtggtccgccgtgctgctgcacctgatcaagcaccggggctacctgtcccagcggaagaacgagggcgagaccgccgacaaggagctgggcgccctgctgaagggcgtggccaacaacgcccacgccctgcagaccggcgacttccggacccccgccgagctggccctgaacaagttcgagaaggagtccggccacatccggaaccagcggggcgactactcccacaccttctcccggaaggacctgcaggccgagctgatcctgctgttcgagaagcagaaggagttcggcaacccccacgtgtccggcggcctgaaggagggcatcgagaccctgctgatgacccagcggcccgccctgtccggcgacgccgtgcagaagatgctgggccactgcaccttcgagcccgccgagcccaaggccgccaagaacacctacaccgccgagcggttcatctggctgaccaagctgaacaacctgcggatcctggagcagggctccgagcggcccctgaccgacaccgagcgggccaccctgatggacgagccctaccggaagtccaagctgacctacgcccaggcccggaagctgctgggcctggaggacaccgccttcttcaagggcctgcggtacggcaaggacaacgccgaggcctccaccctgatggagatgaaggcctaccacgccatctcccgggccctggagaaggagggcctgaaggacaagaagtcccccctgaacctgtcctccgagctgcaggacgagatcggcaccgccttctccctgttcaagaccgacgaggacatcaccggccggctgaaggaccgggtgcagcccgagatcctggaggccctgctgaagcacatctccttcgacaagttcgtgcagatctccctgaaggccctgcggcggatcgtgcccctgatggagcagggcaagcggtacgacgaggcctgcgccgagatctacggcgaccactacggcaagaagaacaccgaggagaagatctacctgccccccatccccgccgacgagatccggaaccccgtggtgctgcgggccctgtcccaggcccggaaggtgatcaacggcgtggtgcggcggtacggctcccccgcccggatccacatcgagaccgcccgggaggtgggcaagtccttcaaggaccggaaggagatcgagaagcggcaggaggagaaccggaaggaccgggagaaggccgccgccaagttccgggagtacttccccaacttcgtgggcgagcccaagtccaaggacatcctgaagctgcggctgtacgagcagcagcacggcaagtgcctgtactccggcaaggagatcaacctggtgcggctgaacgagaagggctacgtggagatcgaccacgccctgcccttctcccggacctgggacgactccttcaacaacaaggtgctggtgctgggctccgagaaccagaacaagggcaaccagaccccctacgagtacttcaacggcaaggacaactcccgggagtggcaggagttcaaggcccgggtggagacctcccggttcccccggtccaagaagcagcggatcctgctgcagaagttcgacgaggacggcttcaaggagtgcaacctgaacgacacccggtacgtgaaccgcttcctgtgccagttcgtggccgaccacatcctgctgaccggcaagggcaagcggcgggtgttcgcctccaacggccagatcaccaacctgctgcggggcttctggggcctgcggaaggtgcgggccgagaacgaccggcaccacgccctggacgccgtggtggtggcctgctccaccgtggccatgcagcagaagatcacccggttcgtgcggtacaaggagatgaacgccttcgacggcaagaccatcgacaaggagaccggcaaggtgctgcaccagaagacccacttcccccagccctgggagttcttcgcccaggaggtgatgatccgggtgttcggcaagcccgacggcaagcccgagttcgaggaggccgacacccccgagaagctgcggaccctgctggccgagaagctgtcctcccggcccgaggccgtgcacgagtacgtgacccccctgttcgtgtcccgggcccccaaccggaagatgtccggcgcccacaaggacaccctgcggtccgccaagcggttcgtgaagcacaacgagaagatctccgtgaagcgggtgtggctgaccgagatcaagctggccgacctggagaacatggtgaactacaagaacggccgggagatcgagctgtacgaggccctgaaggcccggctggaggcctacggcggcaacgccaagcaggccttcgaccccaaggacaaccccttctacaagaagggcggccagctggtgaaggccgtgcgggtggagaagacccaggagtccggcgtgctgctgaacaagaagaacgcctacaccatcgccgacaacggcgacatggtgcgggtggacgtgttctgcaaggtggacaagaagggcaagaaccagtacttcatcgtgcccatctacgcctggcaggtggccgagaacatcctgcccgacatcgactgcaagggctaccggatcgacgactcctacaccttctgcttctccctgcacaagtacgacctgatcgccttccagaaggacgagaagtccaaggtggagttcgcctactacatcaactgcgactcctccaacggccggttctacctggcctggcacgacaagggctccaaggagcagcagttccggatctccacccagaacctggtgctgatccagaagtaccaggtgaacgagctgggcaaggagatccggccctgccggctgaagaagcggccccccgtgcggtccggaaagcggaccgccgacggctccgagttcgagtcccccaagaagaagcggaaggtggagtag

SEQ ID NO: 181 - DNA, 3294 bp, synthetic construct
  source 1..3294: mol_type = other DNA
atggccgccttcaagcccaaccccatcaactacatcctgggcctggacatcggcatcgcctccgtgggctgggccatggtggagatcgacgaggaggagaaccccatccggctgatcgacctgggcgtgcgggtgttcgagcgggccgaggtgcccaagaccggcgactccctggccatggcccggcggctggcccggtccgtgcggcggctgacccggcggcgggcccaccggctgctgcgggcccggcggctgctgaagcgggagggcgtgctgcaggccgccgacttcgacgagaacggcctgatcaagtccctgcccaacaccccctggcagctgcgggccgccgccctggaccggaagctgacccccctggagtggtccgccgtgctgctgcacctgatcaagcaccggggctacctgtcccagcggaagaacgagggcgagaccgccgacaaggagctgggcgccctgctgaagggcgtggccaacaacgcccacgccctgcagaccggcgacttccggacccccgccgagctggccctgaacaagttcgagaaggagtccggccacatccggaaccagcggggcgactactcccacaccttctcccggaaggacctgcaggccgagctgatcctgctgttcgagaagcagaaggagttcggcaacccccacgtgtccggcggcctgaaggagggcatcgagaccctgctgatgacccagcggcccgccctgtccggcgacgccgtgcagaagatgctgggccactgcaccttcgagcccgccgagcccaaggccgccaagaacacctacaccgccgagcggttcatctggctgaccaagctgaacaacctgcggatcctggagcagggctccgagcggcccctgaccgacaccgagcgggccaccctgatggacgagccctaccggaagtccaagctgacctacgcccaggcccggaagctgctgggcctggaggacaccgccttcttcaagggcctgcggtacggcaaggacaacgccgaggcctccaccctgatggagatgaaggcctaccacgccatctcccgggccctggagaaggagggcctgaaggacaagaagtcccccctgaacctgtcctccgagctgcaggacgagatcggcaccgccttctccctgttcaagaccgacgaggacatcaccggccggctgaaggaccgggtgcagcccgagatcctggaggccctgctgaagcacatctccttcgacaagttcgtgcagatctccctgaaggccctgcggcggatcgtgcccctgatggagcagggcaagcggtacgacgaggcctgcgccgagatctacggcgaccactacggcaagaagaacaccgaggagaagatctacctgccccccatccccgccgacgagatccggaaccccgtggtgctgcgggccctgtcccaggcccggaaggtgatcaacggcgtggtgcggcggtacggctcccccgcccggatccacatcgagaccgcccgggaggtgggcaagtccttcaaggaccggaaggagatcgagaagcggcaggaggagaaccggaaggaccgggagaaggccgccgccaagttccgggagtacttccccaacttcgtgggcgagcccaagtccaaggacatcctgaagctgcggctgtacgagcagcagcacggcaagtgcctgtactccggcaaggagatcaacctggtgcggctgaacgagaagggctacgtggagatcgaccacgccctgcccttctcccggacctgggacgactccttcaacaacaaggtgctggtgctgggctccgagaaccagaacaagggcaaccagaccccctacgagtacttcaacggcaaggacaactcccgggagtggcaggagttcaaggcccgggtggagacctcccggttcccccggtccaagaagcagcggatcctgctgcagaagttcgacgaggacggcttcaaggagtgcaacctgaacgacacccggtacgtgaaccggttcctgtgccagttcgtggccgaccacatcctgctgaccggcaagggcaagcggcgggtgttcgcctccaacggccagatcaccaacctgctgcggggcttctggggcctgcggaaggtgcgggccgagaacgaccggcaccacgccctggacgccgtggtggtggcctgctccaccgtggccatgcagcagaagatcacccggttcgtgcggtacaaggagatgaacgccttcgacggcaagaccatcgacaaggagaccggcaaggtgctgcaccagaagacccacttcccccagccctgggagttcttcgcccaggaggtgatgatccgggtgttcggcaagcccgacggcaagcccgagttcgaggaggccgacacccccgagaagctgcggaccctgctggccgagaagctgtcctcccggcccgaggccgtgcacgagtacgtgacccccctgttcgtgtcccgggcccccaaccggaagatgtccggcgcccacaaggacaccctgcggtccgccaagcggttcgtgaagcacaacgagaagatctccgtgaagcgggtgtggctgaccgagatcaagctggccgacctggagaacatggtgaactacaagaacggccgggagatcgagctgtacgaggccctgaaggcccggctggaggcctacggcggcaacgccaagcaggccttcgaccccaaggacaaccccttctacaagaagggcggccagctggtgaaggccgtgcgggtggagaagacccaggagtccggcgtgctgctgaacaagaagaacgcctacaccatcgccgacaacggcgacatggtgcgggtggacgtgttctgcaaggtggacaagtccggcggcggctcccccaagaagaagcggaaggtgtccggcggctccggcaagaaccagtacttcatcgtgcccatctacgcctggcaggtggccgagaacatcctgcccgacatcgactgcaagggctaccggatcgacgactcctacaccttctgcttctccctgcacaagtacgacctgatcgccttccagaaggacgagaagtccaaggtggagttcgcctactacatcaactgcgactcctccaacggccggttctacctggcctggcacgacaagggctccaaggagcagcagttccggatctccacccagaacctggtgctgatccagaagtaccaggtgaacgagctgggcaaggagatccggccctgccggctgaagaagcggccccccgtgcggtag

SEQ ID NO: 182 - DNA, 3333 bp, synthetic construct
  source 1..3333: mol_type = other DNA
atggtgcccaagaagaagcggaaggtggccgccttcaagcccaaccccatcaactacatcctgggcctggacatcggcatcgcctccgtgggctgggccatggtggagatcgacgaggaggagaaccccatccggctgatcgacctgggcgtgcgggtgttcgagcgggccgaggtgcccaagaccggcgactccctggccatggcccggcggctggcccggtccgtgcggcggctgacccggcggcgggcccaccggctgctgcgggcccggcggctgctgaagcgggagggcgtgctgcaggccgccgacttcgacgagaacggcctgatcaagtccctgcccaacaccccctggcagctgcgggccgccgccctggaccggaagctgacccccctggagtggtccgccgtgctgctgcacctgatcaagcaccggggctacctgtcccagcggaagaacgagggcgagaccgccgacaaggagctgggcgccctgctgaagggcgtggccaacaacgcccacgccctgcagaccggcgacttccggacccccgccgagctggccctgaacaagttcgagaaggagtccggccacatccggaaccagcggggcgactactcccacaccttctcccggaaggacctgcaggccgagctgatcctgctgttcgagaagcagaaggagttcggcaacccccacgtgtccggcggcctgaaggagggcatcgagaccctgctgatgacccagcggcccgccctgtccggcgacgccgtgcagaagatgctgggccactgcaccttcgagcccgccgagcccaaggccgccaagaacacctacaccgccgagcggttcatctggctgaccaagctgaacaacctgcggatcctggagcagggctccgagcggcccctgaccgacaccgagcgggccaccctgatggacgagccctaccggaagtccaagctgacctacgcccaggcccggaagctgctgggcctggaggacaccgccttcttcaagggcctgcggtacggcaaggacaacgccgaggcctccaccctgatggagatgaaggcctaccacgccatctcccgggccctggagaaggagggcctgaaggacaagaagtcccccctgaacctgtcctccgagctgcaggacgagatcggcaccgccttctccctgttcaagaccgacgaggacatcaccggccggctgaaggaccgggtgcagcccgagatcctggaggccctgctgaagcacatctccttcgacaagttcgtgcagatctccctgaaggccctgcggcggatcgtgcccctgatggagcagggcaagcggtacgacgaggcctgcgccgagatctacggcgaccactacggcaagaagaacaccgaggagaagatctacctgccccccatccccgccgacgagatccggaaccccgtggtgctgcgggccctgtcccaggcccggaaggtgatcaacggcgtggtgcggcggtacggctcccccgcccggatccacatcgagaccgcccgggaggtgggcaagtccttcaaggaccggaaggagatcgagaagcggcaggaggagaaccggaaggaccgggagaaggccgccgccaagttccgggagtacttccccaacttcgtgggcgagcccaagtccaaggacatcctgaagctgcggctgtacgagcagcagcacggcaagtgcctgtactccggcaaggagatcaacctggtgcggctgaacgagaagggctacgtggagatcgaccacgccctgcccttctcccggacctgggacgactccttcaacaacaaggtgctggtgctgggctccgagaaccagaacaagggcaaccagaccccctacgagtacttcaacggcaaggacaactcccgggagtggcaggagttcaaggcccgggtggagacctcccggttcccccggtccaagaagcagcggatcctgctgcagaagttcgacgaggacggcttcaaggagtgcaacctgaacgacacccggtacgtgaaccggttcctgtgccagttcgtggccgaccacatcctgctgaccggcaagggcaagcggcgggtgttcgcctccaacggccagatcaccaacctgctgcggggcttctggggcctgcggaaggtgcgggccgagaacgaccggcaccacgccctggacgccgtggtggtggcctgctccaccgtggccatgcagcagaagatcacccggttcgtgcggtacaaggagatgaacgccttcgacggcaagaccatcgacaaggagaccggcaaggtgctgcaccagaagacccacttcccccagccctgggagttcttcgcccaggaggtgatgatccgggtgttcggcaagcccgacggcaagcccgagttcgaggaggccgacacccccgagaagctgcggaccctgctggccgagaagctgtcctcccggcccgaggccgtgcacgagtacgtgacccccctgttcgtgtcccgggcccccaaccggaagatgtccggcgcccacaaggacaccctgcggtccgccaagcggttcgtgaagcacaacgagaagatctccgtgaagcgggtgtggctgaccgagatcaagctggccgacctggagaacatggtgaactacaagaacggccgggagatcgagctgtacgaggccctgaaggcccggctggaggcctacggcggcaacgccaagcaggccttcgaccccaaggacaaccccttctacaagaagggcggccagctggtgaaggccgtgcgggtggagaagacccaggagtccggcgtgctgctgaacaagaagaacgcctacaccatcgccgacaacggcgacatggtgcgggtggacgtgttctgcaaggtggacaagaagggcaagaaccagtacttcatcgtgcccatctacgcctggcaggtggccgagaacatcctgcccgacatcgactgcaagggctaccggatcgacgactcctacaccttctgcttctccctgcacaagtacgacctgatcgccttccagaaggacgagaagtccaaggtggagttcgcctactacatcaactgcgactcctccaacggccggttctacctggcctggcacgacaagggctccaaggagcagcagttccggatctccacccagaacctggtgctgatccagaagtaccaggtgaacgagctgggcaaggagatccggccctgccggctgaagaagcggccccccgtgcggtacccctacgacgtgcccgactacgccgccgcccccgccgccaagaagaagaagctggactag

SEQ ID NO: 183 - DNA, 3246 bp, synthetic construct
  source 1..3246: mol_type = other DNA
atggccgccttcaagcccaaccccatcaactacatcctgggcctggacatcggcatcgcctccgtgggctgggccatggtggagatcgacgaggaggagaaccccatccggctgatcgacctgggcgtgcgggtgttcgagcgggccgaggtgcccaagaccggcgactccctggccatggcccggcggctggcccggtccgtgcggcggctgacccggcggcgggcccaccggctgctgcgggcccggcggctgctgaagcgggagggcgtgctgcaggccgccgacttcgacgagaacggcctgatcaagtccctgcccaacaccccctggcagctgcgggccgccgccctggaccggaagctgacccccctggagtggtccgccgtgctgctgcacctgatcaagcaccggggctacctgtcccagcggaagaacgagggcgagaccgccgacaaggagctgggcgccctgctgaagggcgtggccaacaacgcccacgccctgcagaccggcgacttccggacccccgccgagctggccctgaacaagttcgagaaggagtccggccacatccggaaccagcggggcgactactcccacaccttctcccggaaggacctgcaggccgagctgatcctgctgttcgagaagcagaaggagttcggcaacccccacgtgtccggcggcctgaaggagggcatcgagaccctgctgatgacccagcggcccgccctgtccggcgacgccgtgcagaagatgctgggccactgcaccttcgagcccgccgagcccaaggccgccaagaacacctacaccgccgagcggttcatctggctgaccaagctgaacaacctgcggatcctggagcagggctccgagcggcccctgaccgacaccgagcgggccaccctgatggacgagccctaccggaagtccaagctgacctacgcccaggcccggaagctgctgggcctggaggacaccgccttcttcaagggcctgcggtacggcaaggacaacgccgaggcctccaccctgatggagatgaaggcctaccacgccatctcccgggccctggagaaggagggcctgaaggacaagaagtcccccctgaacctgtcctccgagctgcaggacgagatcggcaccgccttctccctgttcaagaccgacgaggacatcaccggccggctgaaggaccgggtgcagcccgagatcctggaggccctgctgaagcacatctccttcgacaagttcgtgcagatctccctgaaggccctgcggcggatcgtgcccctgatggagcagggcaagcggtacgacgaggcctgcgccgagatctacggcgaccactacggcaagaagaacaccgaggagaagatctacctgccccccatccccgccgacgagatccggaaccccgtggtgctgcgggccctgtcccaggcccggaaggtgatcaacggcgtggtgcggcggtacggctcccccgcccggatccacatcgagaccgcccgggaggtgggcaagtccttcaaggaccggaaggagatcgagaagcggcaggaggagaaccggaaggaccgggagaaggccgccgccaagttccgggagtacttccccaacttcgtgggcgagcccaagtccaaggacatcctgaagctgcggctgtacgagcagcagcacggcaagtgcctgtactccggcaaggagatcaacctggtgcggctgaacgagaagggctacgtggagatcgaccacgccctgcccttctcccggacctgggacgactccttcaacaacaaggtgctggtgctgggctccgagaaccagaacaagggcaaccagaccccctacgagtacttcaacggcaaggacaactcccgggagtggcaggagttcaaggcccgggtggagacctcccggttcccccggtccaagaagcagcggatcctgctgcagaagttcgacgaggacggcttcaaggagtgcaacctgaacgacacccggtacgtgaaccggttcctgtgccagttcgtggccgaccacatcctgctgaccggcaagggcaagcggcgggtgttcgcctccaacggccagatcaccaacctgctgcggggcttctggggcctgcggaaggtgcgggccgagaacgaccggcaccacgccctggacgccgtggtggtggcctgctccaccgtggccatgcagcagaagatcacccggttcgtgcggtacaaggagatgaacgccttcgacggcaagaccatcgacaaggagaccggcaaggtgctgcaccagaagacccacttcccccagccctgggagttcttcgcccaggaggtgatgatccgggtgttcggcaagcccgacggcaagcccgagttcgaggaggccgacacccccgagaagctgcggaccctgctggccgagaagctgtcctcccggcccgaggccgtgcacgagtacgtgacccccctgttcgtgtcccgggcccccaaccggaagatgtccggcgcccacaaggacaccctgcggtccgccaagcggttcgtgaagcacaacgagaagatctccgtgaagcgggtgtggctgaccgagatcaagctggccgacctggagaacatggtgaactacaagaacggccgggagatcgagctgtacgaggccctgaaggcccggctggaggcctacggcggcaacgccaagcaggccttcgaccccaaggacaaccccttctacaagaagggcggccagctggtgaaggccgtgcgggtggagaagacccaggagtccggcgtgctgctgaacaagaagaacgcctacaccatcgccgacaacggcgacatggtgcgggtggacgtgttctgcaaggtggacaagaagggcaagaaccagtacttcatcgtgcccatctacgcctggcaggtggccgagaacatcctgcccgacatcgactgcaagggctaccggatcgacgactcctacaccttctgcttctccctgcacaagtacgacctgatcgccttccagaaggacgagaagtccaaggtggagttcgcctactacatcaactgcgactcctccaacggccggttctacctggcctggcacgacaagggctccaaggagcagcagttccggatctccacccagaacctggtgctgatccagaagtaccaggtgaacgagctgggcaaggagatccggccctgccggctgaagaagcggccccccgtgcgg

SEQ ID NO: 184 - DNA, 3246 bp, synthetic construct; identical to SEQ ID NO: 183
  source 1..3246: mol_type = other DNA

SEQ ID NO: 185 - DNA, 3309 bp, synthetic construct
  source 1..3309: mol_type = other DNA
atggacggctccggcggcggctcccccaagaagaagcggaaggtgggcggctccggcggcggcgccgccttcaagcccaaccccatcaactacatcctgggcctggacatcggcatcgcctccgtgggctgggccatggtggagatcgacgaggaggagaaccccatccggctgatcgacctgggcgtgcgggtgttcgagcgggccgaggtgcccaagaccggcgactccctggccatggcccggcggctggcccggtccgtgcggcggctgacccggcggcgggcccaccggctgctgcgggcccggcggctgctgaagcgggagggcgtgctgcaggccgccgacttcgacgagaacggcctgatcaagtccctgcccaacaccccctggcagctgcgggccgccgccctggaccggaagctgacccccctggagtggtccgccgtgctgctgcacctgatcaagcaccggggctacctgtcccagcggaagaacgagggcgagaccgccgacaaggagctgggcgccctgctgaagggcgtggccaacaacgcccacgccctgcagaccggcgacttccggacccccgccgagctggccctgaacaagttcgagaaggagtccggccacatccggaaccagcggggcgactactcccacaccttctcccggaaggacctgcaggccgagctgatcctgctgttcgagaagcagaaggagttcggcaacccccacgtgtccggcggcctgaaggagggcatcgagaccctgctgatgacccagcggcccgccctgtccggcgacgccgtgcagaagatgctgggccactgcaccttcgagcccgccgagcccaaggccgccaagaacacctacaccgccgagcggttcatctggctgaccaagctgaacaacctgcggatcctggagcagggctccgagcggcccctgaccgacaccgagcgggccaccctgatggacgagccctaccggaagtccaagctgacctacgcccaggcccggaagctgctgggcctggaggacaccgccttcttcaagggcctgcggtacggcaaggacaacgccgaggcctccaccctgatggagatgaaggcctaccacgccatctcccgggccctggagaaggagggcctgaaggacaagaagtcccccctgaacctgtcctccgagctgcaggacgagatcggcaccgccttctccctgttcaagaccgacgaggacatcaccggccggctgaaggaccgggtgcagcccgagatcctggaggccctgctgaagcacatctccttcgacaagttcgtgcagatctccctgaaggccctgcggcggatcgtgcccctgatggagcagggcaagcggtacgacgaggcctgcgccgagatctacggcgaccactacggcaagaagaacaccgaggagaagatctacctgccccccatccccgccgacgagatccggaaccccgtggtgctgcgggccctgtcccaggcccggaaggtgatcaacggcgtggtgcggcggtacggctcccccgcccggatccacatcgagaccgcccgggaggtgggcaagtccttcaaggaccggaaggagatcgagaagcggcaggaggagaaccggaaggaccgggagaaggccgccgccaagttccgggagtacttccccaacttcgtgggcgagcccaagtccaaggacatcctgaagctgcggctgtacgagcagcagcacggcaagtgcctgtactccggcaaggagatcaacctggtgcggctgaacgagaagggctacgtggagatcgaccacgccctgcccttctcccggacctgggacgactccttcaacaacaaggtgctggtgctgggctccgagaaccagaacaagggcaaccagaccccctacgagtacttcaacggcaaggacaactcccgggagtggcaggagttcaaggcccgggtggagacctcccggttcccccggtccaagaagcagcggatcctgctgcagaagttcgacgaggacggcttcaaggagtgcaacctgaacgacacccggtacgtgaaccggttcctgtgccagttcgtggccgaccacatcctgctgaccggcaagggcaagcggcgggtgttcgcctccaacggccagatcaccaacctgctgcggggcttctggggcctgcggaaggtgcgggccgagaacgaccggcaccacgccctggacgccgtggtggtggcctgctccaccgtggccatgcagcagaagatcacccggttcgtgcggtacaaggagatgaacgccttcgacggcaagaccatcgacaaggagaccggcaaggtgctgcaccagaagacccacttcccccagccctgggagttcttcgcccaggaggtgatgatccgggtgttcggcaagcccgacggcaagcccgagttcgaggaggccgacacccccgagaagctgcggaccctgctggccgagaagctgtcctcccggcccgaggccgtgcacgagtacgtgacccccctgttcgtgtcccgggcccccaaccggaagatgtccggcgcccacaaggacaccctgcggtccgccaagcggttcgtgaagcacaacgagaagatctccgtgaagcgggtgtggctgaccgagatcaagctggccgacctggagaacatggtgaactacaagaacggccgggagatcgagctgtacgaggccctgaaggcccggctggaggcctacggcggcaacgccaagcaggccttcgaccccaaggacaaccccttctacaagaagggcggccagctggtgaaggccgtgcgggtggagaagacccaggagtccggcgtgctgctgaacaagaagaacgcctacaccatcgccgacaacggcgacatggtgcgggtggacgtgttctgcaaggtggacaagaagggcaagaaccagtacttcatcgtgcccatctacgcctggcaggtggccgagaacatcctgcccgacatcgactgcaagggctaccggatcgacgactcctacaccttctgcttctccctgcacaagtacgacctgatcgccttccagaaggacgagaagtccaaggtggagttcgcctactacatcaactgcgactcctccaacggccggttctacctggcctggcacgacaagggctccaaggagcagcagttccggatctccacccagaacctggtgctgatccagaagtaccaggtgaacgagctgggcaaggagatccggccctgccggctgaagaagcggccccccgtgcggtag

SEQ ID NO: 186 - DNA, 3366 bp, synthetic construct
  source 1..3366: mol_type = other DNA
atggacggctccggcggcggctcccccaagaagaagcggaaggtgggcggctccggcggcggcgccgccttcaagcccaaccccatcaactacatcctgggcctggacatcggcatcgcctccgtgggctgggccatggtggagatcgacgaggaggagaaccccatccggctgatcgacctgggcgtgcgggtgttcgagcgggccgaggtgcccaagaccggcgactccctggccatggcccggcggctggcccggtccgtgcggcggctgacccggcggcgggcccaccggctgctgcgggcccggcggctgctgaagcgggagggcgtgctgcaggccgccgacttcgacgagaacggcctgatcaagtccctgcccaacaccccctggcagctgcgggccgccgccctggaccggaagctgacccccctggagtggtccgccgtgctgctgcacctgatcaagcaccggggctacctgtcccagcggaagaacgagggcgagaccgccgacaaggagctgggcgccctgctgaagggcgtggccaacaacgcccacgccctgcagaccggcgacttccggacccccgccgagctggccctgaacaagttcgagaaggagtccggccacatccggaaccagcggggcgactactcccacaccttctcccggaaggacctgcaggccgagctgatcctgctgttcgagaagcagaaggagttcggcaacccccacgtgtccggcggcctgaaggagggcatcgagaccctgctgatgacccagcggcccgccctgtccggcgacgccgtgcagaagatgctgggccactgcaccttcgagcccgccgagcccaaggccgccaagaacacctacaccgccgagcggttcatctggctgaccaagctgaacaacctgcggatcctggagcagggctccgagcggcccctgaccgacaccgagcgggccaccctgatggacgagccctaccggaagtccaagctgacctacgcccaggcccggaagctgctgggcctggaggacaccgccttcttcaagggcctgcggtacggcaaggacaacgccgaggcctccaccctgatggagatgaaggcctaccacgccatctcccgggccctggagaaggagggcctgaaggacaagaagtcccccctgaacctgtcctccgagctgcaggacgagatcggcaccgccttctccctgttcaagaccgacgaggacatcaccggccggctgaaggaccgggtgcagcccgagatcctggaggccctgctgaagcacatctccttcgacaagttcgtgcagatctccctgaaggccctgcggcggatcgtgcccctgatggagcagggcaagcggtacgacgaggcctgcgccgagatctacggcgaccactacggcaagaagaacaccgaggagaagatctacctgccccccatccccgccgacgagatccggaaccccgtggtgctgcgggccctgtcccaggcccggaaggtgatcaacggcgtggtgcggcggtacggctcccccgcccggatccacatcgagaccgcccgggaggtgggcaagtccttcaaggaccggaaggagatcgagaagcggcaggaggagaaccggaaggaccgggagaaggccgccgccaagttccgggagtacttccccaacttcgtgggcgagcccaagtccaaggacatcctgaagctgcggctgtacgagcagcagcacggcaagtgcctgtactccggcaaggagatcaacctggtgcggctgaacgagaagggctacgtggagatcgaccacgccctgcccttctcccggacctgggacgactccttcaacaacaaggtgctggtgctgggctccgagaaccagaacaagggcaaccagaccccctacgagtacttcaacggcaaggacaactcccgggagtggcaggagttcaaggcccgggtggagacctcccggttcccccggtccaagaagcagcggatcctgctgcagaagttcgacgaggacggcttcaaggagtgcaacctgaacgacacccggtacgtgaaccggttcctgtgccagttcgtggccgaccacatcctgctgaccggcaagggcaagcggcgggtgttcgcctccaacggccagatcaccaacctgctgcggggcttctggggcctgcggaaggtgcgggccgagaacgaccggcaccacgccctggacgccgtggtggtggcctgctccaccgtggccatgcagcagaagatcacccggttcgtgcggtacaaggagatgaacgccttcgacggcaagaccatcgacaaggagaccggcaaggtgctgcaccagaagacccacttcccccagccctgggagttcttcgcccaggaggtgatgatccgggtgttcggcaagcccgacggcaagcccgagttcgaggaggccgacacccccgagaagctgcggaccctgctggccgagaagctgtcctcccggcccgaggccgtgcacgagtacgtgacccccctgttcgtgtcccgggcccccaaccggaagatgtccggcgcccacaaggacaccctgcggtccgccaagcggttcgtgaagcacaacgagaagatctccgtgaagcgggtgtggctgaccgagatcaagctggccgacctggagaacatggtgaactacaagaacggccgggagatcgagctgtacgaggccctgaaggcccggctggaggcctacggcggcaacgccaagcaggccttcgaccccaaggacaaccccttctacaagaagggcggccagctggtgaaggccgtgcgggtggagaagacccaggagtccggcgtgctgctgaacaagaagaacgcctacaccatcgccgacaacggcgacatggtgcgggtggacgtgttctgcaaggtggacaagaagggcaagaaccagtacttcatcgtgcccatctacgcctggcaggtggccgagaacatcctgcccgacatcgactgcaagggctaccggatcgacgactcctacaccttctgcttctccctgcacaagtacgacctgatcgccttccagaaggacgagaagtccaaggtggagttcgcctactacatcaactgcgactcctccaacggccggttctacctggcctggcacgacaagggctccaaggagcagcagttccggatctccacccagaacctggtgctgatccagaagtaccaggtgaacgagctgggcaaggagatccggccctgccggctgaagaagcggccccccgtgcggtccgagtccgccacccccgagtccgtgtccggctggcggctgttcaagaagatctcctag

SEQ ID NO: 187 - DNA, 3375 bp, synthetic construct
  source 1..3375: mol_type = other DNA
atggacggctccggcggcggctcccccaagaagaagcggaaggtgggcggctccggcggcggcgccgccttcaagcccaaccccatcaactacatcctgggcctggacatcggcatcgcctccgtgggctgggccatggtggagatcgacgaggaggagaaccccatccggctgatcgacctgggcgtgcgggtgttcgagcgggccgaggtgcccaagaccggcgactccctggccatggcccggcggctggcccggtccgtgcggcggctgacccggcggcgggcccaccggctgctgcgggcccggcggctgctgaagcgggagggcgtgctgcaggccgccgacttcgacgagaacggcctgatcaagtccctgcccaacaccccctggcagctgcgggccgccgccctggaccggaagctgacccccctggagtggtccgccgtgctgctgcacctgatcaagcaccggggctacctgtcccagcggaagaacgagggcgagaccgccgacaaggagctgggcgccctgctgaagggcgtggccaacaacgcccacgccctgcagaccggcgacttccggacccccgccgagctggccctgaacaagttcgagaaggagtccggccacatccggaaccagcggggcgactactcccacaccttctcccggaaggacctgcaggccgagctgatcctgctgttcgagaagcagaaggagttcggcaacccccacgtgtccggcggcctgaaggagggcatcgagaccctgctgatgacccagcggcccgccctgtccggcgacgccgtgcagaagatgctgggccactgcaccttcgagcccgccgagcccaaggccgccaagaacacctacaccgccgagcggttcatctggctgaccaagctgaacaacctgcggatcctggagcagggctccgagcggcccctgaccgacaccgagcgggccaccctgatggacgagccctaccggaagtccaagctgacctacgcccaggcccggaagctgctgggcctggaggacaccgccttcttcaagggcctgcggtacggcaaggacaacgccgaggcctccaccctgatggagatgaaggcctaccacgccatctcccgggccctggagaaggagggcctgaaggacaagaagtcccccctgaacctgtcctccgagctgcaggacgagatcggcaccgccttctccctgttcaagaccgacgaggacatcaccggccggctgaaggaccgggtgcagcccgagatcctggaggccctgctgaagcacatctccttcgacaagttcgtgcagatctccctgaaggccctgcggcggatcgtgcccctgatggagcagggcaagcggtacgacgaggcctgcgccgagatctacggcgaccactacggcaagaagaacaccgaggagaagatctacctgccccccatccccgccgacgagatccggaaccccgtggtgctgcgggccctgtcccaggcccggaaggtgatcaacggcgtggtgcggcggtacggctcccccgcccggatccacatcgagaccgcccgggaggtgggcaagtccttcaaggaccggaaggagatcgagaagcggcaggaggagaaccggaaggaccgggagaaggccgccgccaagttccgggagtacttccccaacttcgtgggcgagcccaagtccaaggacatcctgaagctgcggctgtacgagcagcagcacggcaagtgcctgtactccggcaaggagatcaacctggtgcggctgaacgagaagggctacgtggagatcgaccacgccctgcccttctcccggacctgggacgactccttcaacaacaaggtgctggtgctgggctccgagaaccagaacaagggcaaccagaccccctacgagtacttcaacggcaaggacaactcccgggagtggcaggagttcaaggcccgggtggagacctcccggttcccccggtccaagaagcagcggatcctgctgcagaagttcgacgaggacggcttcaaggagtgcaacctgaacgacacccggtacgtgaaccggttcctgtgccagttcgtggccgaccacatcctgctgaccggcaagggcaagcggcgggtgttcgcctccaacggccagatcaccaacctgctgcggggcttctggggcctgcggaaggtgcgggccgagaacgaccggcaccacgccctggacgccgtggtggtggcctgctccaccgtggccatgcagcagaagatcacccggttcgtgcggtacaaggagatgaacgccttcgacggcaagaccatcgacaaggagaccggcaaggtgctgcaccagaagacccacttcccccagccctgggagttcttcgcccaggaggtgatgatccgggtgttcggcaagcccgacggcaagcccgagttcgaggaggccgacacccccgagaagctgcggaccctgctggccgagaagctgtcctcccggcccgaggccgtgcacgagtacgtgacccccctgttcgtgtcccgggcccccaaccggaagatgtccggcgcccacaaggacaccctgcggtccgccaagcggttcgtgaagcacaacgagaagatctccgtgaagcgggtgtggctgaccgagatcaagctggccgacctggagaacatggtgaactacaagaacggccgggagatcgagctgtacgaggccctgaaggcccggctggaggcctacggcggcaacgccaagcaggccttcgaccccaaggacaaccccttctacaagaagggcggccagctggtgaaggccgtgcgggtggagaagacccaggagtccggcgtgctgctgaacaagaagaacgcctacaccatcgccgacaacggcgacatggtgcgggtggacgtgttctgcaaggtggacaagaagggcaagaaccagtacttcatcgtgcccatctacgcctggcaggtggccgagaacatcctgcccgacatcgactgcaagggctaccggatcgacgactcctacaccttctgcttctccctgcacaagtacgacctgatcgccttccagaaggacgagaagtccaaggtggagttcgcctactacatcaactgcgactcctccaacggccggttctacctggcctggcacgacaagggctccaaggagcagcagttccggatctccacccagaacctggtgctgatccagaagtaccaggtgaacgagctgggcaaggagatccggccctgccggctgaagaagcggccccccgtgcggtccggaaagcggaccgccgacggctccggaggaggaagccccgccgccaagaagaagaagctggactag

SEQ ID NO: 188 - DNA, 3363 bp, synthetic construct
  source 1..3363: mol_type = other DNA
atggacggctccggcggcggctcccccaagaagaagcggaaggtggaggacaagcggcccgccgccaccaagaaggccggccaggccaagaagaagaagggcggctccggcggcggcgccgccttcaagcccaaccccatcaactacatcctgggcctggacatcggcatcgcctccgtgggctgggccatggtggagatcgacgaggaggagaaccccatccggctgatcgacctgggcgtgcgggtgttcgagcgggccgaggtgcccaagaccggcgactccctggccatggcccggcggctggcccggtccgtgcggcggctgacccggcggcgggcccaccggctgctgcgggcccggcggctgctgaagcgggagggcgtgctgcaggccgccgacttcgacgagaacggcctgatcaagtccctgcccaacaccccctggcagctgcgggccgccgccctggaccggaagctgacccccctggagtggtccgccgtgctgctgcacctgatcaagcaccggggctacctgtcccagcggaagaacgagggcgagaccgccgacaaggagctgggcgccctgctgaagggcgtggccaacaacgcccacgccctgcagaccggcgacttccggacccccgccgagctggccctgaacaagttcgagaaggagtccggccacatccggaaccagcggggcgactactcccacaccttctcccggaaggacctgcaggccgagctgatcctgctgttcgagaagcagaaggagttcggcaacccccacgtgtccggcggcctgaaggagggcatcgagaccctgctgatgacccagcggcccgccctgtccggcgacgccgtgcagaagatgctgggccactgcaccttcgagcccgccgagcccaaggccgccaagaacacctacaccgccgagcggttcatctggctgaccaagctgaacaacctgcggatcctggagcagggctccgagcggcccctgaccgacaccgagcgggccaccctgatggacgagccctaccggaagtccaagctgacctacgcccaggcccggaagctgctgggcctggaggacaccgccttcttcaagggcctgcggtacggcaaggacaacgccgaggcctccaccctgatggagatgaaggcctaccacgccatctcccgggccctggagaaggagggcctgaaggacaagaagtcccccctgaacctgtcctccgagctgcaggacgagatcggcaccgccttctccctgttcaagaccgacgaggacatcaccggccggctgaaggaccgggtgcagcccgagatcctggaggccctgctgaagcacatctccttcgacaagttcgtgcagatctccctgaaggccctgcggcggatcgtgcccctgatggagcagggcaagcggtacgacgaggcctgcgccgagatctacggcgaccactacggcaagaagaacaccgaggagaagatctacctgccccccatccccgccgacgagatccggaaccccgtggtgctgcgggccctgtcccaggcccggaaggtgatcaacggcgtggtgcggcggtacggctcccccgcccggatccacatcgagaccgcccgggaggtgggcaagtccttcaaggaccggaaggagatcgagaagcggcaggaggagaaccggaaggaccgggagaaggccgccgccaagttccgggagtacttccccaacttcgtgggcgagcccaagtccaaggacatcctgaagctgcggctgtacgagcagcagcacggcaagtgcctgtactccggcaaggagatcaacctggtgcggctgaacgagaagggctacgtggagatcgaccacgccctgcccttctcccggacctgggacgactccttcaacaacaaggtgctggtgctgggctccgagaaccagaacaagggcaaccagaccccctacgagtacttcaacggcaaggacaactcccgggagtggcaggagttcaaggcccgggtggagacctcccggttcccccggtccaagaagcagcggatcctgctgcagaagttcgacgaggacggcttcaaggagtgcaacctgaacgacacccggtacgtgaaccggttcctgtgccagttcgtggccgaccacatcctgctgaccggcaagggcaagcggcgggtgttcgcctccaacggccagatcaccaacctgctgcggggcttctggggcctgcggaaggtgcgggccgagaacgaccggcaccacgccctggacgccgtggtggtggcctgctccaccgtggccatgcagcagaagatcacccggttcgtgcggtacaaggagatgaacgccttcgacggcaagaccatcgacaaggagaccggcaaggtgctgcaccagaagacccacttcccccagccctgggagttcttcgcccaggaggtgatgatccgggtgttcggcaagcccgacggcaagcccgagttcgaggaggccgacacccccgagaagctgcggaccctgctggccgagaagctgtcctcccggcccgaggccgtgcacgagtacgtgacccccctgttcgtgtcccgggcccccaaccggaagatgtccggcgcccacaaggacaccctgcggtccgccaagcggttcgtgaagcacaacgagaagatctccgtgaagcgggtgtggctgaccgagatcaagctggccgacctggagaacatggtgaactacaagaacggccgggagatcgagctgtacgaggccctgaaggcccggctggaggcctacggcggcaacgccaagcaggccttcgaccccaaggacaaccccttctacaagaagggcggccagctggtgaaggccgtgcgggtggagaagacccaggagtccggcgtgctgctgaacaagaagaacgcctacaccatcgccgacaacggcgacatggtgcgggtggacgtgttctgcaaggtggacaagaagggcaagaaccagtacttcatcgtgcccatctacgcctggcaggtggccgagaacatcctgcccgacatcgactgcaagggctaccggatcgacgactcctacaccttctgcttctccctgcacaagtacgacctgatcgccttccagaaggacgagaagtccaaggtggagttcgcctactacatcaactgcgactcctccaacggccggttctacctggcctggcacgacaagggctccaaggagcagcagttccggatctccacccagaacctggtgctgatccagaagtaccaggtgaacgagctgggcaaggagatccggccctgccggctgaagaagcggccccccgtgcggtag

SEQ ID NO: 189 - DNA, 3420 bp, synthetic construct
  source 1..3420: mol_type = other DNA
atggacggctccggcggcggctcccccaagaagaagcggaaggtggaggacaagcggcccgccgccaccaagaaggccggccaggccaagaagaagaagggcggctccggcggcggcgccgccttcaagcccaaccccatcaactacatcctgggcctggacatcggcatcgcctccgtgggctgggccatggtggagatcgacgaggaggagaaccccatccggctgatcgacctgggcgtgcgggtgttcgagcgggccgaggtgcccaagaccggcgactccctggccatggcccggcggctggcccggtccgtgcggcggctgacccggcggcgggcccaccggctgctgcgggcccggcggctgctgaagcgggagggcgtgctgcaggccgccgacttcgacgagaacggcctgatcaagtccctgcccaacaccccctggcagctgcgggccgccgccctggaccggaagctgacccccctggagtggtccgccgtgctgctgcacctgatcaagcaccggggctacctgtcccagcggaagaacgagggcgagaccgccgacaaggagctgggcgccctgctgaagggcgtggccaacaacgcccacgccctgcagaccggcgacttccggacccccgccgagctggccctgaacaagttcgagaaggagtccggccacatccggaaccagcggggcgactactcccacaccttctcccggaaggacctgcaggccgagctgatcctgctgttcgagaagcagaaggagttcggcaacccccacgtgtccggcggcctgaaggagggcatcgagaccctgctgatgacccagcggcccgccctgtccggcgacgccgtgcagaagatgctgggccactgcaccttcgagcccgccgagcccaaggccgccaagaacacctacaccgccgagcggttcatctggctgaccaagctgaacaacctgcggatcctggagcagggctccgagcggcccctgaccgacaccgagcgggccaccctgatggacgagccctaccggaagtccaagctgacctacgcccaggcccggaagctgctgggcctggaggacaccgccttcttcaagggcctgcggtacggcaaggacaacgccgaggcctccaccctgatggagatgaaggcctaccacgccatctcccgggccctggagaaggagggcctgaaggacaagaagtcccccctgaacctgtcctccgagctgcaggacgagatcggcaccgccttctccctgttcaagaccgacgaggacatcaccggccggctgaaggaccgggtgcagcccgagatcctggaggccctgctgaagcacatctccttcgacaagttcgtgcagatctccctgaaggccctgcggcggatcgtgcccctgatggagcagggcaagcggtacgacgaggcctgcgccgagatctacggcgaccactacggcaagaagaacaccgaggagaagatctacctgccccccatccccgccgacgagatccggaaccccgtggtgctgcgggccctgtcccaggcccggaaggtgatcaacggcgtggtgcggcggtacggctcccccgcccggatccacatcgagaccgcccgggaggtgggcaagtccttcaaggaccggaaggagatcgagaagcggcaggaggagaaccggaaggaccgggagaaggccgccgccaagttccgggagtacttccccaacttcgtgggcgagcccaagtccaaggacatcctgaagctgcggctgtacgagcagcagcacggcaagtgcctgtactccggcaaggagatcaacctggtgcggctgaacgagaagggctacgtggagatcgaccacgccctgcccttctcccggacctgggacgactccttcaacaacaaggtgctggtgctgggctccgagaaccagaacaagggcaaccagaccccctacgagtacttcaacggcaaggacaactcccgggagtggcaggagttcaaggcccgggtggagacctcccggttcccccggtccaagaagcagcggatcctgctgcagaagttcgacgaggacggcttcaaggagtgcaacctgaacgacacccggtacgtgaaccggttcctgtgccagttcgtggccgaccacatcctgctgaccggcaagggcaagcggcgggtgttcgcctccaacggccagatcaccaacctgctgcggggcttctggggcctgcggaaggtgcgggccgagaacgaccggcaccacgccctggacgccgtggtggtggcctgctccaccgtggccatgcagcagaagatcacccggttcgtgcggtacaaggagatgaacgccttcgacggcaagaccatcgacaaggagaccggcaaggtgctgcaccagaagacccacttcccccagccctgggagttcttcgcccaggaggtgatgatccgggtgttcggcaagcccgacggcaagcccgagttcgaggaggccgacacccccgagaagctgcggaccctgctggccgagaagctgtcctcccggcccgaggccgtgcacgagtacgtgacccccctgttcgtgtcccgggcccccaaccggaagatgtccggcgcccacaaggacaccctgcggtccgccaagcggttcgtgaagcacaacgagaagatctccgtgaagcgggtgtggctgaccgagatcaagctggccgacctggagaacatggtgaactacaagaacggccgggagatcgagctgtacgaggccctgaaggcccggctggaggcctacggcggcaacgccaagcaggccttcgaccccaaggacaaccccttctacaagaagggcggccagctggtgaaggccgtgcgggtggagaagacccaggagtccggcgtgctgctgaacaagaagaacgcctacaccatcgccgacaacggcgacatggtgcgggtggacgtgttctgcaaggtggacaagaagggcaagaaccagtacttcatcgtgcccatctacgcctggcaggtggccgagaacatcctgcccgacatcgactgcaagggctaccggatcgacgactcctacaccttctgcttctccctgcacaagtacgacctgatcgccttccagaaggacgagaagtccaaggtggagttcgcctactacatcaactgcgactcctccaacggccggttctacctggcctggcacgacaagggctccaaggagcagcagttccggatctccacccagaacctggtgctgatccagaagtaccaggtgaacgagctgggcaaggagatccggccctgccggctgaagaagcggccccccgtgcggtccgagtccgccacccccgagtccgtgtccggctggcggctgttcaagaagatctcctag

SEQ ID NO: 190 - DNA, 3342 bp, synthetic construct
  source 1..3342: mol_type = other DNA
atggacggctccggcggcggctccgaggacaagcggcccgccgccaccaagaaggccggccaggccaagaagaagaagggcggctccggcggcggcgccgccttcaagcccaaccccatcaactacatcctgggcctggacatcggcatcgcctccgtgggctgggccatggtggagatcgacgaggaggagaaccccatccggctgatcgacctgggcgtgcgggtgttcgagcgggccgaggtgcccaagaccggcgactccctggccatggcccggcggctggcccggtccgtgcggcggctgacccggcggcgggcccaccggctgctgcgggcccggcggctgctgaagcgggagggcgtgctgcaggccgccgacttcgacgagaacggcctgatcaagtccctgcccaacaccccctggcagctgcgggccgccgccctggaccggaagctgacccccctggagtggtccgccgtgctgctgcacctgatcaagcaccggggctacctgtcccagcggaagaacgagggcgagaccgccgacaaggagctgggcgccctgctgaagggcgtggccaacaacgcccacgccctgcagaccggcgacttccggacccccgccgagctggccctgaacaagttcgagaaggagtccggccacatccggaaccagcggggcgactactcccacaccttctcccggaaggacctgcaggccgagctgatcctgctgttcgagaagcagaaggagttcggcaacccccacgtgtccggcggcctgaaggagggcatcgagaccctgctgatgacccagcggcccgccctgtccggcgacgccgtgcagaagatgctgggccactgcaccttcgagcccgccgagcccaaggccgccaagaacacctacaccgccgagcggttcatctggctgaccaagctgaacaacctgcggatcctggagcagggctccgagcggcccctgaccgacaccgagcgggccaccctgatggacgagccctaccggaagtccaagctgacctacgcccaggcccggaagctgctgggcctggaggacaccgccttcttcaagggcctgcggtacggcaaggacaacgccgaggcctccaccctgatggagatgaaggcctaccacgccatctcccgggccctggagaaggagggcctgaaggacaagaagtcccccctgaacctgtcctccgagctgcaggacgagatcggcaccgccttctccctgttcaagaccgacgaggacatcaccggccggctgaaggaccgggtgcagcccgagatcctggaggccctgctgaagcacatctccttcgacaagttcgtgcagatctccctgaaggccctgcggcggatcgtgcccctgatggagcagggcaagcggtacgacgaggcctgcgccgagatctacggcgaccactacggcaagaagaacaccgaggagaagatctacctgccccccatccccgccgacgagatccggaaccccgtggtgctgcgggccctgtcccaggcccggaaggtgatcaacggcgtggtgcggcggtacggctcccccgcccggatccacatcgagaccgcccgggaggtgggcaagtccttcaaggaccggaaggagatcgagaagcggcaggaggagaaccggaaggaccgggagaaggccgccgccaagttccgggagtacttccccaacttcgtgggcgagcccaagtccaaggacatcctgaagctgcggctgtacgagcagcagcacggcaagtgcctgtactccggcaaggagatcaacctggtgcggctgaacgagaagggctacgtggagatcgaccacgccctgcccttctcccggacctgggacgactccttcaacaacaaggtgctggtgctgggctccgagaaccagaacaagggcaaccagaccccctacgagtacttcaacggcaaggacaactcccgggagtggcaggagttcaaggcccgggtggagacctcccggttcccccggtccaagaagcagcggatcctgctgcagaagttcgacgaggacggcttcaaggagtgcaacctgaacgacacccggtacgtgaaccggttcctgtgccagttcgtggccgaccacatcctgctgaccggcaagggcaagcggcgggtgttcgcctccaacggccagatcaccaacctgctgcggggcttctggggcctgcggaaggtgcgggccgagaacgaccggcaccacgccctggacgccgtggtggtggcctgctccaccgtggccatgcagcagaagatcacccggttcgtgcggtacaaggagatgaacgccttcgacggcaagaccatcgacaaggagaccggcaaggtgctgcaccagaagacccacttcccccagccctgggagttcttcgcccaggaggtgatgatccgggtgttcggcaagcccgacggcaagcccgagttcgaggaggccgacacccccgagaagctgcggaccctgctggccgagaagctgtcctcccggcccgaggccgtgcacgagtacgtgacccccctgttcgtgtcccgggcccccaaccggaagatgtccggcgcccacaaggacaccctgcggtccgccaagcggttcgtgaagcacaacgagaagatctccgtgaagcgggtgtggctgaccgagatcaagctggccgacctggagaacatggtgaactacaagaacggccgggagatcgagctgtacgaggccctgaaggcccggctggaggcctacggcggcaacgccaagcaggccttcgaccccaaggacaaccccttctacaagaagggcggccagctggtgaaggccgtgcgggtggagaagacccaggagtccggcgtgctgctgaacaagaagaacgcctacaccatcgccgacaacggcgacatggtgcgggtggacgtgttctgcaaggtggacaagaagggcaagaaccagtacttcatcgtgcccatctacgcctggcaggtggccgagaacatcctgcccgacatcgactgcaagggctaccggatcgacgactcctacaccttctgcttctccctgcacaagtacgacctgatcgccttccagaaggacgagaagtccaaggtggagttcgcctactacatcaactgcgactcctccaacggccggttctacctggcctggcacgacaagggctccaaggagcagcagttccggatctccacccagaacctggtgctgatccagaagtaccaggtgaacgagctgggcaaggagatccggccctgccggctgaagaagcggccccccgtgcggtag

SEQ ID NO: 191 - protein, 1082 aa, synthetic construct
MAAFKPNSINYILGLDIGIASVGWAMVEIDEEENPIRLIDLGVRVFERAEVPKTGDSLAMARRLARSVRRLTRRRAHRLLRTRRLLKREGVLQAANFDENGLIKSLPNTPWQLRAAALDRKLTPLEWSAVLLHLIKHRGYLSQRKNEGETADKELGALLKGVAGNAHALQTGDFRTPAELALNKFEKESGHIRNQRSDYSHTFSRKDLQAELILLFEKQKEFGNPHVSGGLKEGIETLLMTQRPALSGDAVQKMLGHCTFEPAEPKAAKNTYTAERFIWLTKLNNLRILEQGSERPLTDTERATLMDEPYRKSKLTYAQARKLLGLEDTAFFKGLRYGKDNAEASTLMEMKAYHAISRALEKEGLKDKKSPLNLSPELQDEIGTAFSLFKTDEDITGRLKDRIQPEILEALLKHISFDKFVQISLKALRRIVPLMEQGKRYDEACAEIYGDHYGKKNTEEKIYLPPIPADEIRNPVVLRALSQARKVINGVVRRYGSPARIHIETAREVGKSFKDRKEIEKRQEENRKDREKAAAKFREYFPNFVGEPKSKDILKLRLYEQQHGKCLYSGKEINLGRLNEKGYVEIDHALPFSRTWDDSFNNKVLVLGSENQNKGNQTPYEYFNGKDNSREWQEFKARVETSRFPRSKKQRILLQKFDEDGFKERNLNDTRYVNRFLCQFVADRMRLTGKGKKRVFASNGQITNLLRGFWGLRKVRAENDRHHALDAVVVACSTVAMQQKITRFVRYKEMNAFDGKTIDKETGEVLHQKTHFPQPWEFFAQEVMIRVFGKPDGKPEFEEADTLEKLRTLLAEKLSSRPEAVHEYVTPLFVSRAPNRKMSGQGHMETVKSAKRLDEGVSVLRVPLTQLKLKDLEKMVNREREPKLYEALKARLEAHKDDPAKAFAEPFYKYDKAGNRTQQVKAVRVEQVQKTGVWVRNHNGIADNATMVRVDVFEKGDKYYLVPIYSWQVAKGILPDRAVVQGKDEEDWQLIDDSFNFKFSLHPNDLVEVITKKARMFGYFASCHRGTGNINIRIHDLDHKIGKNGILEGIGVKTALSFQKYQIDELGKEIRPCRLKKRPPVR

SEQ ID NO: 192 - DNA, 3243 bp, synthetic construct
  source 1..3243: mol_type = other DNA
gctgcttttaagcctaattctattaattatattcttggtcttgatattggtattgcttctgttggttgggctatggttgagattgatgaggaggagaatcctattcgtcttattgatcttggtgttcgtgtttttgagcgtgctgaggttcctaagactggtgattctcttgctatggctcgtcgtcttgctcgttctgttcgtcgtcttactcgtcgtcgtgctcatcgtcttcttcgtactcgtcgtcttcttaagcgtgagggtgttcttcaggctgctaattttgatgagaatggtcttattaagtctcttcctaatactccttggcagcttcgtgctgctgctcttgatcgtaagcttactcctcttgagtggtctgctgttcttcttcatcttattaagcatcgtggttatctttctcagcgtaagaatgagggtgagactgctgataaggagcttggtgctcttcttaagggtgttgctggtaatgctcatgctcttcagactggtgattttcgtactcctgctgagcttgctcttaataagtttgagaaggagtctggtcatattcgtaatcagcgttctgattattctcatactttttctcgtaaggatcttcaggctgagcttattcttctttttgagaagcagaaggagtttggtaatcctcatgtttctggtggtcttaaggagggtattgagactcttcttatgactcagcgtcctgctctttctggtgatgctgttcagaagatgcttggtcattgtacttttgagcctgctgagcctaaggctgctaagaatacttatactgctgagcgttttatttggcttactaagcttaataatcttcgtattcttgagcagggttctgagcgtcctcttactgatactgagcgtgctactcttatggatgagccttatcgtaagtctaagcttacttatgctcaggctcgtaagcttcttggtcttgaggatactgctttttttaagggtcttcgttatggtaaggataatgctgaggcttctactcttatggagatgaaggcttatcatgctatttctcgtgctcttgagaaggagggtcttaaggataagaagtctcctcttaatctttctcctgagcttcaggatgagattggtactgctttttctctttttaagactgatgaggatattactggtcgtcttaaggatcgtattcagcctgagattcttgaggctcttcttaagcatatttcttttgataagtttgttcagatttctcttaaggctcttcgtcgtattgttcctcttatggagcagggtaagcgttatgatgaggcttgtgctgagatttatggtgatcattatggtaagaagaatactgaggagaagatttatcttcctcctattcctgctgatgagattcgtaatcctgttgttcttcgtgctctttctcaggctcgtaaggttattaatggtgttgttcgtcgttatggttctcctgctcgtattcatattgagactgctcgtgaggttggtaagtcttttaaggatcgtaaggagattgagaagcgtcaggaggagaatcgtaaggatcgtgagaaggctgctgctaagtttcgtgagtattttcctaattttgttggtgagcctaagtctaaggatattcttaagcttcgtctttatgagcagcagcatggtaagtgtctttattctggtaaggagattaatcttggtcgtcttaatgagaagggttatgttgagattgatcatgctcttcctttttctcgtacttgggatgattcttttaataataaggttcttgttcttggttctgagaatcagaataagggtaatcagactccttatgagtattttaatggtaaggataattctcgtgagtggcaggagtttaaggctcgtgttgagacttctcgttttcctcgttctaagaagcagcgtattcttcttcagaagtttgatgaggatggttttaaggagcgtaatcttaatgatactcgttatgttaatcgttttctttgtcagtttgttgctgatcgtatgcgtcttactggtaagggtaagaagcgtgtttttgcttctaatggtcagattactaatcttcttcgtggtttttggggtcttcgtaaggttcgtgctgagaatgatcgtcatcatgctcttgatgctgttgttgttgcttgttctactgttgctatgcagcagaagattactcgttttgttcgttataaggagatgaatgcttttgatggtaagactattgataaggagactggtgaggttcttcatcagaagactcattttcctcagccttgggagttttttgctcaggaggttatgattcgtgtttttggtaagcctgatggtaagcctgagtttgaggaggctgatactcttgagaagcttcgtactcttcttgctgagaagctttcttctcgtcctgaggctgttcatgagtatgttactcctctttttgtttctcgtgctcctaatcgtaagatgtctggtcagggtcatatggagactgttaagtctgctaagcgtcttgatgagggtgtttctgttcttcgtgttcctcttactcagcttaagcttaaggatcttgagaagatggttaatcgtgagcgtgagcctaagctttatgaggctcttaaggctcgtcttgaggctcataaggatgatcctgctaaggcttttgctgagcctttttataagtatgataaggctggtaatcgtactcagcaggttaaggctgttcgtgttgagcaggttcagaagactggtgtttgggttcgtaatcataatggtattgctgataatgctactatggttcgtgttgatgtttttgagaagggtgataagtattatcttgttcctatttattcttggcaggttgctaagggtattcttcctgatcgtgctgttgttcagggtaaggatgaggaggattggcagcttattgatgattcttttaattttaagttttctcttcatcctaatgatcttgttgaggttattactaagaaggctcgtatgtttggttattttgcttcttgtcatcgtggtactggtaatattaatattcgtattcatgatcttgatcataagattggtaagaatggtattcttgagggtattggtgttaagactgctctttcttttcagaagtatcagattgatgagcttggtaaggagattcgtccttgtcgtcttaagaagcgtcctcctgttcgt

SEQ ID NO: 193 - DNA, 3243 bp, synthetic construct
  source 1..3243: mol_type = other DNA
gccgccttcaagcccaactccatcaactacatcctgggcctggacatcggcatcgcctccgtgggctgggccatggtggagatcgacgaggaggagaaccccatccggctgatcgacctgggcgtgcgggtgttcgagcgggccgaggtgcccaagaccggcgactccctggccatggcccggcggctggcccggtccgtgcggcggctgacccggcggcgggcccaccggctgctgcggacccggcggctgctgaagcgggagggcgtgctgcaggccgccaacttcgacgagaacggcctgatcaagtccctgcccaacaccccctggcagctgcgggccgccgccctggaccggaagctgacccccctggagtggtccgccgtgctgctgcacctgatcaagcaccggggctacctgtcccagcggaagaacgagggcgagaccgccgacaaggagctgggcgccctgctgaagggcgtggccggcaacgcccacgccctgcagaccggcgacttccggacccccgccgagctggccctgaacaagttcgagaaggagtccggccacatccggaaccagcggtccgactactcccacaccttctcccggaaggacctgcaggccgagctgatcctgctgttcgagaagcagaaggagttcggcaacccccacgtgtccggcggcctgaaggagggcatcgagaccctgctgatgacccagcggcccgccctgtccggcgacgccgtgcagaagatgctgggccactgcaccttcgagcccgccgagcccaaggccgccaagaacacctacaccgccgagcggttcatctggctgaccaagctgaacaacctgcggatcctggagcagggctccgagcggcccctgaccgacaccgagcgggccaccctgatggacgagccctaccggaagtccaagctgacctacgcccaggcccggaagctgctgggcctggaggacaccgccttcttcaagggcctgcggtacggcaaggacaacgccgaggcctccaccctgatggagatgaaggcctaccacgccatctcccgggccctggagaaggagggcctgaaggacaagaagtcccccctgaacctgtcccccgagctgcaggacgagatcggcaccgccttctccctgttcaagaccgacgaggacatcaccggccggctgaaggaccggatccagcccgagatcctggaggccctgctgaagcacatctccttcgacaagttcgtgcagatctccctgaaggccctgcggcggatcgtgcccctgatggagcagggcaagcggtacgacgaggcctgcgccgagatctacggcgaccactacggcaagaagaacaccgaggagaagatctacctgccccccatccccgccgacgagatccggaaccccgtggtgctgcgggccctgtcccaggcccggaaggtgatcaacggcgtggtgcggcggtacggctcccccgcccggatccacatcgagaccgcccgggaggtgggcaagtccttcaaggaccggaaggagatcgagaagcggcaggaggagaaccggaaggaccgggagaaggccgccgccaagttccgggagtacttccccaacttcgtgggcgagcccaagtccaaggacatcctgaagctgcggctgtacgagcagcagcacggcaagtgcctgtactccggcaaggagatcaacctgggccggctgaacgagaagggctacgtggagatcgaccacgccctgcccttctcccggacctgggacgactccttcaacaacaaggtgctggtgctgggctccgagaaccagaacaagggcaaccagaccccctacgagtacttcaacggcaaggacaactcccgggagtggcaggagttcaaggcccgggtggagacctcccggttcccccggtccaagaagcagcggatcctgctgcagaagttcgacgaggacggcttcaaggagcggaacctgaacgacacccggtacgtgaaccggttcctgtgccagttcgtggccgaccggatgcggctgaccggcaagggcaagaagcgggtgttcgcctccaacggccagatcaccaacctgctgcggggcttctggggcctgcggaaggtgcgggccgagaacgaccggcaccacgccctggacgccgtggtggtggcctgctccaccgtggccatgcagcagaagatcacccggttcgtgcggtacaaggagatgaacgccttcgacggcaagaccatcgacaaggagaccggcgaggtgctgcaccagaagacccacttcccccagccctgggagttcttcgcccaggaggtgatgatccgggtgttcggcaagcccgacggcaagcccgagttcgaggaggccgacaccctggagaagctgcggaccctgctggccgagaagctgtcctcccggcccgaggccgtgcacgagtacgtgacccccctgttcgtgtcccgggcccccaaccggaagatgtccggccagggccacatggagaccgtgaagtccgccaagcggctggacgagggcgtgtccgtgctgcgggtgcccctgacccagctgaagctgaaggacctggagaagatggtgaaccgggagcgggagcccaagctgtacgaggccctgaaggcccggctggaggcccacaaggacgaccccgccaaggccttcgccgagcccttctacaagtacgacaaggccggcaaccggacccagcaggtgaaggccgtgcgggtggagcaggtgcagaagaccggcgtgtgggtgcggaaccacaacggcatcgccgacaacgccaccatggtgcgggtggacgtgttcgagaagggcgacaagtactacctggtgcccatctactcctggcaggtggccaagggcatcctgcccgaccgggccgtggtgcagggcaaggacgaggaggactggcagctgatcgacgactccttcaacttcaagttctccctgcaccccaacgacctggtggaggtgatcaccaagaaggcccggatgttcggctacttcgcctcctgccaccggggcaccggcaacatcaacatccggatccacgacctggaccacaagatcggcaagaacggcatcctggagggcatcggcgtgaagaccgccctgtccttccagaagtaccagatcgacgagctgggcaaggagatccggccctgccggctgaagaagcggccccccgtgcgg

SEQ ID NO: 194 - DNA, 3243 bp, synthetic construct
  source 1..3243: mol_type = other DNA
gcagcattcaaaccaaactcaatcaactacatcctaggactagacatcggaatcgcatcagtaggatgagcaatggtagaaatcgacgaagaagaaaacccaatccgactaatcgacctaggagtacgagtattcgaacgagcagaagtaccaaaaacaggagactcactagcaatggcacgacgactagcacgatcagtacgacgactaacacgacgacgagcacaccgactactacgaacacgacgactactaaaacgagaaggagtactacaagcagcaaacttcgacgaaaacggactaatcaaatcactaccaaacacaccatgacaactacgagcagcagcactagaccgaaaactaacaccactagaatgatcagcagtactactacacctaatcaaacaccgaggatacctatcacaacgaaaaaacgaaggagaaacagcagacaaagaactaggagcactactaaaaggagtagcaggaaacgcacacgcactacaaacaggagacttccgaacaccagcagaactagcactaaacaaattcgaaaaagaatcaggacacatccgaaaccaacgatcagactactcacacacattctcacgaaaagacctacaagcagaactaatcctactattcgaaaaacaaaaagaattcggaaacccacacgtatcaggaggactaaaagaaggaatcgaaacactactaatgacacaacgaccagcactatcaggagacgcagtacaaaaaatgctaggacactgcacattcgaaccagcagaaccaaaagcagcaaaaaacacatacacagcagaacgattcatctgactaacaaaactaaacaacctacgaatcctagaacaaggatcagaacgaccactaacagacacagaacgagcaacactaatggacgaaccataccgaaaatcaaaactaacatacgcacaagcacgaaaactactaggactagaagacacagcattcttcaaaggactacgatacggaaaagacaacgcagaagcatcaacactaatggaaatgaaagcataccacgcaatctcacgagcactagaaaaagaaggactaaaagacaaaaaatcaccactaaacctatcaccagaactacaagacgaaatcggaacagcattctcactattcaaaacagacgaagacatcacaggacgactaaaagaccgaatccaaccagaaatcctagaagcactactaaaacacatctcattcgacaaattcgtacaaatctcactaaaagcactacgacgaatcgtaccactaatggaacaaggaaaacgatacgacgaagcatgcgcagaaatctacggagaccactacggaaaaaaaaacacagaagaaaaaatctacctaccaccaatcccagcagacgaaatccgaaacccagtagtactacgagcactatcacaagcacgaaaagtaatcaacggagtagtacgacgatacggatcaccagcacgaatccacatcgaaacagcacgagaagtaggaaaatcattcaaagaccgaaaagaaatcgaaaaacgacaagaagaaaaccgaaaagaccgagaaaaagcagcagcaaaattccgagaatacttcccaaacttcgtaggagaaccaaaatcaaaagacatcctaaaactacgactatacgaacaacaacacggaaaatgcctatactcaggaaaagaaatcaacctaggacgactaaacgaaaaaggatacgtagaaatcgaccacgcactaccattctcacgaacatgagacgactcattcaacaacaaagtactagtactaggatcagaaaaccaaaacaaaggaaaccaaacaccatacgaatacttcaacggaaaagacaactcacgagaatgacaagaattcaaagcacgagtagaaacatcacgattcccacgatcaaaaaaacaacgaatcctactacaaaaattcgacgaagacggattcaaagaacgaaacctaaacgacacacgatacgtaaaccgattcctatgccaattcgtagcagaccgaatgcgactaacaggaaaaggaaaaaaacgagtattcgcatcaaacggacaaatcacaaacctactacgaggattctgaggactacgaaaagtacgagcagaaaacgaccgacaccacgcactagacgcagtagtagtagcatgctcaacagtagcaatgcaacaaaaaatcacacgattcgtacgatacaaagaaatgaacgcattcgacggaaaaacaatcgacaaagaaacaggagaagtactacaccaaaaaacacacttcccacaaccatgagaattcttcgcacaagaagtaatgatccgagtattcggaaaaccagacggaaaaccagaattcgaagaagcagacacactagaaaaactacgaacactactagcagaaaaactatcatcacgaccagaagcagtacacgaatacgtaacaccactattcgtatcacgagcaccaaaccgaaaaatgtcaggacaaggacacatggaaacagtaaaatcagcaaaacgactagacgaaggagtatcagtactacgagtaccactaacacaactaaaactaaaagacctagaaaaaatggtaaaccgagaacgagaaccaaaactatacgaagcactaaaagcacgactagaagcacacaaagacgacccagcaaaagcattcgcagaaccattctacaaatacgacaaagcaggaaaccgaacacaacaagtaaaagcagtacgagtagaacaagtacaaaaaacaggagtatgagtacgaaaccacaacggaatcgcagacaacgcaacaatggtacgagtagacgtattcgaaaaaggagacaaatactacctagtaccaatctactcatgacaagtagcaaaaggaatcctaccagaccgagcagtagtacaaggaaaagacgaagaagactgacaactaatcgacgactcattcaacttcaaattctcactacacccaaacgacctagtagaagtaatcacaaaaaaagcacgaatgttcggatacttcgcatcatgccaccgaggaacaggaaacatcaacatccgaatccacgacctagaccacaaaatcggaaaaaacggaatcctagaaggaatcggagtaaaaacagcactatcattccaaaaataccaaatcgacgaactaggaaaagaaatccgaccatgccgactaaaaaaacgaccaccagtacga

SEQ ID NO: 195 - DNA, 3249 bp, synthetic construct
  source 1..3249: mol_type = other DNA
  modified_base 3247: mod_base = OTHER; note = uracil
atggctgcttttaagcctaattctattaattatattcttggtcttgatattggtattgcttctgttggttgggctatggttgagattgatgaggaggagaatcctattcgtcttattgatcttggtgttcgtgtttttgagcgtgctgaggttcctaagactggtgattctcttgctatggctcgtcgtcttgctcgttctgttcgtcgtcttactcgtcgtcgtgctcatcgtcttcttcgtactcgtcgtcttcttaagcgtgagggtgttcttcaggctgctaattttgatgagaatggtcttattaagtctcttcctaatactccttggcagcttcgtgctgctgctcttgatcgtaagcttactcctcttgagtggtctgctgttcttcttcatcttattaagcatcgtggttatctttctcagcgtaagaatgagggtgagactgctgataaggagcttggtgctcttcttaagggtgttgctggtaatgctcatgctcttcagactggtgattttcgtactcctgctgagcttgctcttaataagtttgagaaggagtctggtcatattcgtaatcagcgttctgattattctcatactttttctcgtaaggatcttcaggctgagcttattcttctttttgagaagcagaaggagtttggtaatcctcatgtttctggtggtcttaaggagggtattgagactcttcttatgactcagcgtcctgctctttctggtgatgctgttcagaagatgcttggtcattgtacttttgagcctgctgagcctaaggctgctaagaatacttatactgctgagcgttttatttggcttactaagcttaataatcttcgtattcttgagcagggttctgagcgtcctcttactgatactgagcgtgctactcttatggatgagccttatcgtaagtctaagcttacttatgctcaggctcgtaagcttcttggtcttgaggatactgctttttttaagggtcttcgttatggtaaggataatgctgaggcttctactcttatggagatgaaggcttatcatgctatttctcgtgctcttgagaaggagggtcttaaggataagaagtctcctcttaatctttctcctgagcttcaggatgagattggtactgctttttctctttttaagactgatgaggatattactggtcgtcttaaggatcgtattcagcctgagattcttgaggctcttcttaagcatatttcttttgataagtttgttcagatttctcttaaggctcttcgtcgtattgttcctcttatggagcagggtaagcgttatgatgaggcttgtgctgagatttatggtgatcattatggtaagaagaatactgaggagaagatttatcttcctcctattcctgctgatgagattcgtaatcctgttgttcttcgtgctctttctcaggctcgtaaggttattaatggtgttgttcgtcgttatggttctcctgctcgtattcatattgagactgctcgtgaggttggtaagtcttttaaggatcgtaaggagattgagaagcgtcaggaggagaatcgtaaggatcgtgagaaggctgctgctaagtttcgtgagtattttcctaattttgttggtgagcctaagtctaaggatattcttaagcttcgtctttatgagcagcagcatggtaagtgtctttattctggtaaggagattaatcttggtcgtcttaatgagaagggttatgttgagattgatcatgctcttcctttttctcgtacttgggatgattcttttaataataaggttcttgttcttggttctgagaatcagaataagggtaatcagactccttatgagtattttaatggtaaggataattctcgtgagtggcaggagtttaaggctcgtgttgagacttctcgttttcctcgttctaagaagcagcgtattcttcttcagaagtttgatgaggatggttttaaggagcgtaatcttaatgatactcgttatgttaatcgttttctttgtcagtttgttgctgatcgtatgcgtcttactggtaagggtaagaagcgtgtttttgcttctaatggtcagattactaatcttcttcgtggtttttggggtcttcgtaaggttcgtgctgagaatgatcgtcatcatgctcttgatgctgttgttgttgcttgttctactgttgctatgcagcagaagattactcgttttgttcgttataaggagatgaatgcttttgatggtaagactattgataaggagactggtgaggttcttcatcagaagactcattttcctcagccttgggagttttttgctcaggaggttatgattcgtgtttttggtaagcctgatggtaagcctgagtttgaggaggctgatactcttgagaagcttcgtactcttcttgctgagaagctttcttctcgtcctgaggctgttcatgagtatgttactcctctttttgtttctcgtgctcctaatcgtaagatgtctggtcagggtcatatggagactgttaagtctgctaagcgtcttgatgagggtgtttctgttcttcgtgttcctcttactcagcttaagcttaaggatcttgagaagatggttaatcgtgagcgtgagcctaagctttatgaggctcttaaggctcgtcttgaggctcataaggatgatcctgctaaggcttttgctgagcctttttataagtatgataaggctggtaatcgtactcagcaggttaaggctgttcgtgttgagcaggttcagaagactggtgtttgggttcgtaatcataatggtattgctgataatgctactatggttcgtgttgatgtttttgagaagggtgataagtattatcttgttcctatttattcttggcaggttgctaagggtattcttcctgatcgtgctgttgttcagggtaaggatgaggaggattggcagcttattgatgattcttttaattttaagttttctcttcatcctaatgatcttgttgaggttattactaagaaggctcgtatgtttggttattttgcttcttgtcatcgtggtactggtaatattaatattcgtattcatgatcttgatcataagattggtaagaatggtattcttgagggtattggtgttaagactgctctttcttttcagaagtatcagattgatgagcttggtaaggagattcgtccttgtcgtcttaagaagcgtcctcctgttcgttga

SEQ ID NO: 196 - DNA, 3249 bp, synthetic construct
  source 1..3249: mol_type = other DNA
  modified_base 3247: mod_base = OTHER; note = uracil
atggccgccttcaagcccaactccatcaactacatcctgggcctggacatcggcatcgcctccgtgggctgggccatggtggagatcgacgaggaggagaaccccatccggctgatcgacctgggcgtgcgggtgttcgagcgggccgaggtgcccaagaccggcgactccctggccatggcccggcggctggcccggtccgtgcggcggctgacccggcggcgggcccaccggctgctgcggacccggcggctgctgaagcgggagggcgtgctgcaggccgccaacttcgacgagaacggcctgatcaagtccctgcccaacaccccctggcagctgcgggccgccgccctggaccggaagctgacccccctggagtggtccgccgtgctgctgcacctgatcaagcaccggggctacctgtcccagcggaagaacgagggcgagaccgccgacaaggagctgggcgccctgctgaagggcgtggccggcaacgcccacgccctgcagaccggcgacttccggacccccgccgagctggccctgaacaagttcgagaaggagtccggccacatccggaaccagcggtccgactactcccacaccttctcccggaaggacctgcaggccgagctgatcctgctgttcgagaagcagaaggagttcggcaacccccacgtgtccggcggcctgaaggagggcatcgagaccctgctgatgacccagcggcccgccctgtccggcgacgccgtgcagaagatgctgggccactgcaccttcgagcccgccgagcccaaggccgccaagaacacctacaccgccgagcggttcatctggctgaccaagctgaacaacctgcggatcctggagcagggctccgagcggcccctgaccgacaccgagcgggccaccctgatggacgagccctaccggaagtccaagctgacctacgcccaggcccggaagctgctgggcctggaggacaccgccttcttcaagggcctgcggtacggcaaggacaacgccgaggcctccaccctgatggagatgaaggcctaccacgccatctcccgggccctggagaaggagggcctgaaggacaagaagtcccccctgaacctgtcccccgagctgcaggacgagatcggcaccgccttctccctgttcaagaccgacgaggacatcaccggccggctgaaggaccggatccagcccgagatcctggaggccctgctgaagcacatctccttcgacaagttcgtgcagatctccctgaaggccctgcggcggatcgtgcccctgatggagcagggcaagcggtacgacgaggcctgcgccgagatctacggcgaccactacggcaagaagaacaccgaggagaagatctacctgccccccatccccgccgacgagatccggaaccccgtggtgctgcgggccctgtcccaggcccggaaggtgatcaacggcgtggtgcggcggtacggctcccccgcccggatccacatcgagaccgcccgggaggtgggcaagtccttcaaggaccggaaggagatcgagaagcggcaggaggagaaccggaaggaccgggagaaggccgccgccaagttccgggagtacttccccaacttcgtgggcgagcccaagtccaaggacatcctgaagctgcggctgtacgagcagcagcacggcaagtgcctgtactccggcaaggagatcaacctgggccggctgaacgagaagggctacgtggagatcgaccacgccctgcccttctcccggacctgggacgactccttcaacaacaaggtgctggtgctgggctccgagaaccagaacaagggcaaccagaccccctacgagtacttcaacggcaaggacaactcccgggagtggcaggagttcaaggcccgggtggagacctcccggttcccccggtccaagaagcagcggatcctgctgcagaagttcgacgaggacggcttcaaggagcggaacctgaacgacacccggtacgtgaaccggttcctgtgccagttcgtggccgaccggatgcggctgaccggcaagggcaagaagcgggtgttcgcctccaacggccagatcaccaacctgctgcggggcttctggggcctgcggaaggtgcgggccgagaacgaccggcaccacgccctggacgccgtggtggtggcctgctccaccgtggccatgcagcagaagatcacccggttcgtgcggtacaaggagatgaacgccttcgacggcaagaccatcgacaaggagaccggcgaggtgctgcaccagaagacccacttcccccagccctgggagttcttcgcccaggaggtgatgatccgggtgttcggcaagcccgacggcaagcccgagttcgaggaggccgacaccctggagaagctgcggaccctgctggccgagaagctgtcctcccggcccgaggccgtgcacgagtacgtgacccccctgttcgtgtcccgggcccccaaccggaagatgtccggccagggccacatggagaccgtgaagtccgccaagcggctggacgagggcgtgtccgtgctgcgggtgcccctgacccagctgaagctgaaggacctggagaagatggtgaaccgggagcgggagcccaagctgtacgaggccctgaaggcccggctggaggcccacaaggacgaccccgccaaggccttcgccgagcccttctacaagtacgacaaggccggcaaccggacccagcaggtgaaggccgtgcgggtggagcaggtgcagaagaccggcgtgtgggtgcggaaccacaacggcatcgccgacaacgccaccatggtgcgggtggacgtgttcgagaagggcgacaagtactacctggtgcccatctactcctggcaggtggccaagggcatcctgcccgaccgggccgtggtgcagggcaaggacgaggaggactggcagctgatcgacgactccttcaacttcaagttctccctgcaccccaacgacctggtggaggtgatcaccaagaaggcccggatgttcggctacttcgcctcctgccaccggggcaccggcaacatcaacatccggatccacgacctggaccacaagatcggcaagaacggcatcctggagggcatcggcgtgaagaccgccctgtccttccagaagtaccagatcgacgagctgggcaaggagatccggccctgccggctgaagaagcggccccccgtgcggtga

SEQ ID NO: 197 - DNA, 3249 bp, synthetic construct
  source 1..3249: mol_type = other DNA
  modified_base 3247: mod_base = OTHER; note = uracil
atggcagcattcaaaccaaactcaatcaactacatcctaggactagacatcggaatcgcatcagtaggatgagcaatggtagaaatcgacgaagaagaaaacccaatccgactaatcgacctaggagtacgagtattcgaacgagcagaagtaccaaaaacaggagactcactagcaatggcacgacgactagcacgatcagtacgacgactaacacgacgacgagcacaccgactactacgaacacgacgactactaaaacgagaaggagtactacaagcagcaaacttcgacgaaaacggactaatcaaatcactaccaaacacaccatgacaactacgagcagcagcactagaccgaaaactaacaccactagaatgatcagcagtactactacacctaatcaaacaccgaggatacctatcacaacgaaaaaacgaaggagaaacagcagacaaagaactaggagcactactaaaaggagtagcaggaaacgcacacgcactacaaacaggagacttccgaacaccagcagaactagcactaaacaaattcgaaaaagaatcaggacacatccgaaaccaacgatcagactactcacacacattctcacgaaaagacctacaagcagaactaatcctactattcgaaaaacaaaaagaattcggaaacccacacgtatcaggaggactaaaagaaggaatcgaaacactactaatgacacaacgaccagcactatcaggagacgcagtacaaaaaatgctaggacactgcacattcgaaccagcagaaccaaaagcagcaaaaaacacatacacagcagaacgattcatctgactaacaaaactaaacaacctacgaatcctagaacaaggatcagaacgaccactaacagacacagaacgagcaacactaatggacgaaccataccgaaaatcaaaactaacatacgcacaagcacgaaaactactaggactagaagacacagcattcttcaaaggactacgatacggaaaagacaacgcagaagcatcaacactaatggaaatgaaagcataccacgcaatctcacgagcactagaaaaagaaggactaaaagacaaaaaatcaccactaaacctatcaccagaactacaagacgaaatcggaacagcattctcactattcaaaacagacgaagacatcacaggacgactaaaagaccgaatccaaccagaaatcctagaagcactactaaaacacatctcattcgacaaattcgtacaaatctcactaaaagcactacgacgaatcgtaccactaatggaacaaggaaaacgatacgacgaagcatgcgcagaaatctacggagaccactacggaaaaaaaaacacagaagaaaaaatctacctaccaccaatcccagcagacgaaatccgaaacccagtagtactacgagcactatcacaagcacgaaaagtaatcaacggagtagtacgacgatacggatcaccagcacgaatccacatcgaaacagcacgagaagtaggaaaatcattcaaagaccgaaaagaaatcgaaaaacgacaagaagaaaaccgaaaagaccgagaaaaagcagcagcaaaattccgagaatacttcccaaacttcgtaggagaaccaaaatcaaaagacatcctaaaactacgactatacgaacaacaacacggaaaatgcctatactcaggaaaagaaatcaacctaggacgactaaacgaaaaaggatacgtagaaatcgaccacgcactaccattctcacgaacatgagacgactcattcaacaacaaagtactagtactaggatcagaaaaccaaaacaaaggaaaccaaacaccatacgaatacttcaacggaaaagacaactcacgagaatgacaagaattcaaagcacgagtagaaacatcacgattcccacgatcaaaaaaacaacgaatcctactacaaaaattcgacgaagacggattcaaagaacgaaacctaaacgacacacgatacgtaaaccgattcctatgccaattcgtagcagaccgaatgcgactaacaggaaaaggaaaaaaacgagtattcgcatcaaacggacaaatcacaaacctactacgaggattctgaggactacgaaaagtacgagcagaaaacgaccgacaccacgcactagacgcagtagtagtagcatgctcaacagtagcaatgcaacaaaaaatcacacgattcgtacgatacaaagaaatgaacgcattcgacggaaaaacaatcgacaaagaaacaggagaagtactacaccaaaaaacacacttcccacaaccatgagaattcttcgcacaagaagtaatgatccgagtattcggaaaaccagacggaaaaccagaattcgaagaagcagacacactagaaaaactacgaacactactagcagaaaaactatcatcacgaccagaagcagtacacgaatacgtaacaccactattcgtatcacgagcaccaaaccgaaaaatgtcaggacaaggacacatggaaacagtaaaatcagcaaaacgactagacgaaggagtatcagtactacgagtaccactaacacaactaaaactaaaagacctagaaaaaatggtaaaccgagaacgagaaccaaaactatacgaagcactaaaagcacgactagaagcacacaaagacgacccagcaaaagcattcgcagaaccattctacaaatacgacaaagcaggaaaccgaacacaacaagtaaaagcagtacgagtagaacaagtacaaaaaacaggagtatgagtacgaaaccacaacggaatcgcagacaacgcaacaatggtacgagtagacgtattcgaaaaaggagacaaatactacctagtaccaatctactcatgacaagtagcaaaaggaatcctaccagaccgagcagtagtacaaggaaaagacgaagaagactgacaactaatcgacgactcattcaacttcaaattctcactacacccaaacgacctagtagaagtaatcacaaaaaaagcacgaatgttcggatacttcgcatcatgccaccgaggaacaggaaacatcaacatccgaatccacgacctagaccacaaaatcggaaaaaacggaatcctagaaggaatcggagtaaaaacagcactatcattccaaaaataccaaatcgacgaactaggaaaagaaatccgaccatgccgactaaaaaaacgaccaccagtacgataa

SEQ ID NO: 198 - protein, 1082 aa, synthetic construct
MAAFKPNSINYILGLDIGIASVGWAMVEIDEEENPIRLIDLGVRVFERAEVPKTGDSLAMARRLARSVRRLTRRRAHRLLRTRRLLKREGVLQAANFDENGLIKSLPNTPWQLRAAALDRKLTPLEWSAVLLHLIKHRGYLSQRKNEGETADKELGALLKGVAGNAHALQTGDFRTPAELALNKFEKESGHIRNQRSDYSHTFSRKDLQAELILLFEKQKEFGNPHVSGGLKEGIETLLMTQRPALSGDAVQKMLGHCTFEPAEPKAAKNTYTAERFIWLTKLNNLRILEQGSERPLTDTERATLMDEPYRKSKLTYAQARKLLGLEDTAFFKGLRYGKDNAEASTLMEMKAYHAISRALEKEGLKDKKSPLNLSPELQDEIGTAFSLFKTDEDITGRLKDRIQPEILEALLKHISFDKFVQISLKALRRIVPLMEQGKRYDEACAEIYGDHYGKKNTEEKIYLPPIPADEIRNPVVLRALSQARKVINGVVRRYGSPARIHIETAREVGKSFKDRKEIEKRQEENRKDREKAAAKFREYFPNFVGEPKSKDILKLRLYEQQHGKCLYSGKEINLGRLNEKGYVEIDAALPFSRTWDDSFNNKVLVLGSENQNKGNQTPYEYFNGKDNSREWQEFKARVETSRFPRSKKQRILLQKFDEDGFKERNLNDTRYVNRFLCQFVADRMRLTGKGKKRVFASNGQITNLLRGFWGLRKVRAENDRHHALDAVVVACSTVAMQQKITRFVRYKEMNAFDGKTIDKETGEVLHQKTHFPQPWEFFAQEVMIRVFGKPDGKPEFEEADTLEKLRTLLAEKLSSRPEAVHEYVTPLFVSRAPNRKMSGQGHMETVKSAKRLDEGVSVLRVPLTQLKLKDLEKMVNREREPKLYEALKARLEAHKDDPAKAFAEPFYKYDKAGNRTQQVKAVRVEQVQKTGVWVRNHNGIADNATMVRVDVFEKGDKYYLVPIYSWQVAKGILPDRAVVQGKDEEDWQLIDDSFNFKFSLHPNDLVEVITKKARMFGYFASCHRGTGNINIRIHDLDHKIGKNGILEGIGVKTALSFQKYQIDELGKEIRPCRLKKRPPVR

SEQ ID NO: 199 - DNA, 3243 bp, synthetic construct
  source 1..3243: mol_type = other DNA
gctgcttttaagcctaattctattaattatattcttggtcttgatattggtattgcttctgttggttgggctatggttgagattgatgaggaggagaatcctattcgtcttattgatcttggtgttcgtgtttttgagcgtgctgaggttcctaagactggtgattctcttgctatggctcgtcgtcttgctcgttctgttcgtcgtcttactcgtcgtcgtgctcatcgtcttcttcgtactcgtcgtcttcttaagcgtgagggtgttcttcaggctgctaattttgatgagaatggtcttattaagtctcttcctaatactccttggcagcttcgtgctgctgctcttgatcgtaagcttactcctcttgagtggtctgctgttcttcttcatcttattaagcatcgtggttatctttctcagcgtaagaatgagggtgagactgctgataaggagcttggtgctcttcttaagggtgttgctggtaatgctcatgctcttcagactggtgattttcgtactcctgctgagcttgctcttaataagtttgagaaggagtctggtcatattcgtaatcagcgttctgattattctcatactttttctcgtaaggatcttcaggctgagcttattcttctttttgagaagcagaaggagtttggtaatcctcatgtttctggtggtcttaaggagggtattgagactcttcttatgactcagcgtcctgctctttctggtgatgctgttcagaagatgcttggtcattgtacttttgagcctgctgagcctaaggctgctaagaatacttatactgctgagcgttttatttggcttactaagcttaataatcttcgtattcttgagcagggttctgagcgtcctcttactgatactgagcgtgctactcttatggatgagccttatcgtaagtctaagcttacttatgctcaggctcgtaagcttcttggtcttgaggatactgctttttttaagggtcttcgttatggtaaggataatgctgaggcttctactcttatggagatgaaggcttatcatgctatttctcgtgctcttgagaaggagggtcttaaggataagaagtctcctcttaatctttctcctgagcttcaggatgagattggtactgctttttctctttttaagactgatgaggatattactggtcgtcttaaggatcgtattcagcctgagattcttgaggctcttcttaagcatatttcttttgataagtttgttcagatttctcttaaggctcttcgtcgtattgttcctcttatggagcagggtaagcgttatgatgaggcttgtgctgagatttatggtgatcattatggtaagaagaatactgaggagaagatttatcttcctcctattcctgctgatgagattcgtaatcctgttgttcttcgtgctctttctcaggctcgtaaggttattaatggtgttgttcgtcgttatggttctcctgctcgtattcatattgagactgctcgtgaggttggtaagtcttttaaggatcgtaaggagattgagaagcgtcaggaggagaatcgtaaggatcgtgagaaggctgctgctaagtttcgtgagtattttcctaattttgttggtgagcctaagtctaaggatattcttaagcttcgtctttatgagcagcagcatggtaagtgtctttattctggtaaggagattaatcttggtcgtcttaatgagaagggttatgttgagattgatgctgctcttcctttttctcgtacttgggatgattcttttaataataaggttcttgttcttggttctgagaatcagaataagggtaatcagactccttatgagtattttaatggtaaggataattctcgtgagtggcaggagtttaaggctcgtgttgagacttctcgttttcctcgttctaagaagcagcgtattcttcttcagaagtttgatgaggatggttttaaggagcgtaatcttaatgatactcgttatgttaatcgttttctttgtcagtttgttgctgatcgtatgcgtcttactggtaagggtaagaagcgtgtttttgcttctaatggtcagattactaatcttcttcgtggtttttggggtcttcgtaaggttcgtgctgagaatgatcgtcatcatgctcttgatgctgttgttgttgcttgttctactgttgctatgcagcagaagattactcgttttgttcgttataaggagatgaatgcttttgatggtaagactattgataaggagactggtgaggttcttcatcagaagactcattttcctcagccttgggagttttttgctcaggaggttatgattcgtgtttttggtaagcctgatggtaagcctgagtttgaggaggctgatactcttgagaagcttcgtactcttcttgctgagaagctttcttctcgtcctgaggctgttcatgagtatgttactcctctttttgtttctcgtgctcctaatcgtaagatgtctggtcagggtcatatggagactgttaagtctgctaagcgtcttgatgagggtgtttctgttcttcgtgttcctcttactcagcttaagcttaaggatcttgagaagatggttaatcgtgagcgtgagcctaagctttatgaggctcttaaggctcgtcttgaggctcataaggatgatcctgctaaggcttttgctgagcctttttataagtatgataaggctggtaatcgtactcagcaggttaaggctgttcgtgttgagcaggttcagaagactggtgtttgggttcgtaatcataatggtattgctgataatgctactatggttcgtgttgatgtttttgagaagggtgataagtattatcttgttcctatttattcttggcaggttgctaagggtattcttcctgatcgtgctgttgttcagggtaaggatgaggaggattggcagcttattgatgattcttttaattttaagttttctcttcatcctaatgatcttgttgaggttattactaagaaggctcgtatgtttggttattttgcttcttgtcatcgtggtactggtaatattaatattcgtattcatgatcttgatcataagattggtaagaatggtattcttgagggtattggtgttaagactgctctttcttttcagaagtatcagattgatgagcttggtaaggagattcgtccttgtcgtcttaagaagcgtcctcctgttcgt

SEQ ID NO: 200 - DNA, 3243 bp, synthetic construct
  source 1..3243: mol_type = other DNA
gccgccttcaagcccaactccatcaactacatcctgggcctggacatcggcatcgcctccgtgggctgggccatggtggagatcgacgaggaggagaaccccatccggctgatcgacctgggcgtgcgggtgttcgagcgggccgaggtgcccaagaccggcgactccctggccatggcccggcggctggcccggtccgtgcggcggctgacccggcggcgggcccaccggctgctgcggacccggcggctgctgaagcgggagggcgtgctgcaggccgccaacttcgacgagaacggcctgatcaagtccctgcccaacaccccctggcagctgcgggccgccgccctggaccggaagctgacccccctggagtggtccgccgtgctgctgcacctgatcaagcaccggggctacctgtcccagcggaagaacgagggcgagaccgccgacaaggagctgggcgccctgctgaagggcgtggccggcaacgcccacgccctgcagaccggcgacttccggacccccgccgagctggccctgaacaagttcgagaaggagtccggccacatccggaaccagcggtccgactactcccacaccttctcccggaaggacctgcaggccgagctgatcctgctgttcgagaagcagaaggagttcggcaacccccacgtgtccggcggcctgaaggagggcatcgagaccctgctgatgacccagcggcccgccctgtccggcgacgccgtgcagaagatgctgggccactgcaccttcgagcccgccgagcccaaggccgccaagaacacctacaccgccgagcggttcatctggctgaccaagctgaacaacctgcggatcctggagcagggctccgagcggcccctgaccgacaccgagcgggccaccctgatggacgagccctaccggaagtccaagctgacctacgcccaggcccggaagctgctgggcctggaggacaccgccttcttcaagggcctgcggtacggcaaggacaacgccgaggcctccaccctgatggagatgaaggcctaccacgccatctcccgggccctggagaaggagggcctgaaggacaagaagtcccccctgaacctgtcccccgagctgcaggacgagatcggcaccgccttctccctgttcaagaccgacgaggacatcaccggccggctgaaggaccggatccagcccgagatcctggaggccctgctgaagcacatctccttcgacaagttcgtgcagatctccctgaaggccctgcggcggatcgtgcccctgatggagcagggcaagcggtacgacgaggcctgcgccgagatctacggcgaccactacggcaagaagaacaccgaggagaagatctacctgccccccatccccgccgacgagatccggaaccccgtggtgctgcgggccctgtcccaggcccggaaggtgatcaacggcgtggtgcggcggtacggctcccccgcccggatccacatcgagaccgcccgggaggtgggcaagtccttcaaggaccggaaggagatcgagaagcggcaggaggagaaccggaaggaccgggagaaggccgccgccaagttccgggagtacttccccaacttcgtgggcgagcccaagtccaaggacatcctgaagctgcggctgtacgagcagcagcacggcaagtgcctgtactccggcaaggagatcaacctgggccggctgaacgagaagggctacgtggagatcgacgccgccctgcccttctcccggacctgggacgactccttcaacaacaaggtgctggtgctgggctccgagaaccagaacaagggcaaccagaccccctacgagtacttcaacggcaaggacaactcccgggagtggcaggagttcaaggcccgggtggagacctcccggttcccccggtccaagaagcagcggatcctgctgcagaagttcgacgaggacggcttcaaggagcggaacctgaacgacacccggtacgtgaaccggttcctgtgccagttcgtggccgaccggatgcggctgaccggcaagggcaagaagcgggtgttcgcctccaacggccagatcaccaacctgctgcggggcttctggggcctgcggaaggtgcgggccgagaacgaccggcaccacgccctggacgccgtggtggtggcctgctccaccgtggccatgcagcagaagatcacccggttcgtgcggtacaaggagatgaacgccttcgacggcaagaccatcgacaaggagaccggcgaggtgctgcaccagaagacccacttcccccagccctgggagttcttcgcccaggaggtgatgatccgggtgttcggcaagcccgacggcaagcccgagttcgaggaggccgacaccctggagaagctgcggaccctgctggccgagaagctgtcctcccggcccgaggccgtgcacgagtacgtgacccccctgttcgtgtcccgggcccccaaccggaagatgtccggccagggccacatggagaccgtgaagtccgccaagcggctggacgagggcgtgtccgtgctgcgggtgcccctgacccagctgaagctgaaggacctggagaagatggtgaaccgggagcgggagcccaagctgtacgaggccctgaaggcccggctggaggcccacaaggacgaccccgccaaggccttcgccgagcccttctacaagtacgacaaggccggcaaccggacccagcaggtgaaggccgtgcgggtggagcaggtgcagaagaccggcgtgtgggtgcggaaccacaacggcatcgccgacaacgccaccatggtgcgggtggacgtgttcgagaagggcgacaagtactacctggtgcccatctactcctggcaggtggccaagggcatcctgcccgaccgggccgtggtgcagggcaaggacgaggaggactggcagctgatcgacgactccttcaacttcaagttctccctgcaccccaacgacctggtggaggtgatcaccaagaaggcccggatgttcggctacttcgcctcctgccaccggggcaccggcaacatcaacatccggatccacgacctggaccacaagatcggcaagaacggcatcctggagggcatcggcgtgaagaccgccctgtccttccagaagtaccagatcgacgagctgggcaaggagatccggccctgccggctgaagaagcggccccccgtgcgg

SEQ ID NO: 201 - DNA, 3243 bp, synthetic construct
  source 1..3243: mol_type = other DNA
gcagcattcaaaccaaactcaatcaactacatcctaggactagacatcggaatcgcatcagtaggatgagcaatggtagaaatcgacgaagaagaaaacccaatccgactaatcgacctaggagtacgagtattcgaacgagcagaagtaccaaaaacaggagactcactagcaatggcacgacgactagcacgatcagtacgacgactaacacgacgacgagcacaccgactactacgaacacgacgactactaaaacgagaaggagtactacaagcagcaaacttcgacgaaaacggactaatcaaatcactaccaaacacaccatgacaactacgagcagcagcactagaccgaaaactaacaccactagaatgatcagcagtactactacacctaatcaaacaccgaggatacctatcacaacgaaaaaacgaaggagaaacagcagacaaagaactaggagcactactaaaaggagtagcaggaaacgcacacgcactacaaacaggagacttccgaacaccagcagaactagcactaaacaaattcgaaaaagaatcaggacacatccgaaaccaacgatcagactactcacacacattctcacgaaaagacctacaagcagaactaatcctactattcgaaaaacaaaaagaattcggaaacccacacgtatcaggaggactaaaagaaggaatcgaaacactactaatgacacaacgaccagcactatcaggagacgcagtacaaaaaatgctaggacactgcacattcgaaccagcagaaccaaaagcagcaaaaaacacatacacagcagaacgattcatctgactaacaaaactaaacaacctacgaatcctagaacaaggatcagaacgaccactaacagacacagaacgagcaacactaatggacgaaccataccgaaaatcaaaactaacatacgcacaagcacgaaaactactaggactagaagacacagcattcttcaaaggactacgatacggaaaagacaacgcagaagcatcaacactaatggaaatgaaagcataccacgcaatctcacgagcactagaaaaagaaggactaaaagacaaaaaatcaccactaaacctatcaccagaactacaagacgaaatcggaacagcattctcactattcaaaacagacgaagacatcacaggacgactaaaagaccgaatccaaccagaaatcctagaagcactactaaaacacatctcattcgacaaattcgtacaaatctcactaaaagcactacgacgaatcgtaccactaatggaacaaggaaaacgatacgacgaagcatgcgcagaaatctacggagaccactacggaaaaaaaaacacagaagaaaaaatctacctaccaccaatcccagcagacgaaatccgaaacccagtagtactacgagcactatcacaagcacgaaaagtaatcaacggagtagtacgacgatacggatcaccagcacgaatccacatcgaaacagcacgagaagtaggaaaatcattcaaagaccgaaaagaaatcgaaaaacgacaagaagaaaaccgaaaagaccgagaaaaagcagcagcaaaattccgagaatacttcccaaacttcgtaggagaaccaaaatcaaaagacatcctaaaactacgactatacgaacaacaacacggaaaatgcctatactcaggaaaagaaatcaacctaggacgactaaacgaaaaaggatacgtagaaatcgacgcagcactaccattctcacgaacatgagacgactcattcaacaacaaagtactagtactaggatcagaaaaccaaaacaaaggaaaccaaacaccatacgaatacttcaacggaaaagacaactcacgagaatgacaagaattcaaagcacgagtagaaacatcacgattcccacgatcaaaaaaacaacgaatcctactacaaaaattcgacgaagacggattcaaagaacgaaacctaaacgacacacgatacgtaaaccgattcctatgccaattcgtagcagaccgaatgcgactaacaggaaaaggaaaaaaacgagtattcgcatcaaacggacaaatcacaaacctactacgaggattctgaggactacgaaaagtacgagcagaaaacgaccgacaccacgcactagacgcagtagtagtagcatgctcaacagtagcaatgcaacaaaaaatcacacgattcgtacgatacaaagaaatgaacgcattcgacggaaaaacaatcgacaaagaaacaggagaagtactacaccaaaaaacacacttcccacaaccatgagaattcttcgcacaagaagtaatgatccgagtattcggaaaaccagacggaaaaccagaattcgaagaagcagacacactagaaaaactacgaacactactagcagaaaaactatcatcacgaccagaagcagtacacgaatacgtaacaccactattcgtatcacgagcaccaaaccgaaaaatgtcaggacaaggacacatggaaacagtaaaatcagcaaaacgactagacgaaggagtatcagtactacgagtaccactaacacaactaaaactaaaagacctagaaaaaatggtaaaccgagaacgagaaccaaaactatacgaagcactaaaagcacgactagaagcacacaaagacgacccagcaaaagcattcgcagaaccattctacaaatacgacaaagcaggaaaccgaacacaacaagtaaaagcagtacgagtagaacaagtacaaaaaacaggagtatgagtacgaaaccacaacggaatcgcagacaacgcaacaatggtacgagtagacgtattcgaaaaaggagacaaatactacctagtaccaatctactcatgacaagtagcaaaaggaatcctaccagaccgagcagtagtacaaggaaaagacgaagaagactgacaactaatcgacgactcattcaacttcaaattctcactacacccaaacgacctagtagaagtaatcacaaaaaaagcacgaatgttcggatacttcgcatcatgccaccgaggaacaggaaacatcaacatccgaatccacgacctagaccacaaaatcggaaaaaacggaatcctagaaggaatcggagtaaaaacagcactatcattccaaaaataccaaatcgacgaactaggaaaagaaatccgaccatgccgactaaaaaaacgaccaccagtacga

SEQ ID NO: 202 - DNA, 3249 bp, synthetic construct
  source 1..3249: mol_type = other DNA
  modified_base 3247: mod_base = OTHER; note = uracil
atggctgcttttaagcctaattctattaattatattcttggtcttgatattggtattgcttctgttggttgggctatggttgagattgatgaggaggagaatcctattcgtcttattgatcttggtgttcgtgtttttgagcgtgctgaggttcctaagactggtgattctcttgctatggctcgtcgtcttgctcgttctgttcgtcgtcttactcgtcgtcgtgctcatcgtcttcttcgtactcgtcgtcttcttaagcgtgagggtgttcttcaggctgctaattttgatgagaatggtcttattaagtctcttcctaatactccttggcagcttcgtgctgctgctcttgatcgtaagcttactcctcttgagtggtctgctgttcttcttcatcttattaagcatcgtggttatctttctcagcgtaagaatgagggtgagactgctgataaggagcttggtgctcttcttaagggtgttgctggtaatgctcatgctcttcagactggtgattttcgtactcctgctgagcttgctcttaataagtttgagaaggagtctggtcatattcgtaatcagcgttctgattattctcatactttttctcgtaaggatcttcaggctgagcttattcttctttttgagaagcagaaggagtttggtaatcctcatgtttctggtggtcttaaggagggtattgagactcttcttatgactcagcgtcctgctctttctggtgatgctgttcagaagatgcttggtcattgtacttttgagcctgctgagcctaaggctgctaagaatacttatactgctgagcgttttatttggcttactaagcttaataatcttcgtattcttgagcagggttctgagcgtcctcttactgatactgagcgtgctactcttatggatgagccttatcgtaagtctaagcttacttatgctcaggctcgtaagcttcttggtcttgaggatactgctttttttaagggtcttcgttatggtaaggataatgctgaggcttctactcttatggagatgaaggcttatcatgctatttctcgtgctcttgagaaggagggtcttaaggataagaagtctcctcttaatctttctcctgagcttcaggatgagattggtactgctttttctctttttaagactgatgaggatattactggtcgtcttaaggatcgtattcagcctgagattcttgaggctcttcttaagcatatttcttttgataagtttgttcagatttctcttaaggctcttcgtcgtattgttcctcttatggagcagggtaagcgttatgatgaggcttgtgctgagatttatggtgatcattatggtaagaagaatactgaggagaagatttatcttcctcctattcctgctgatgagattcgtaatcctgttgttcttcgtgctctttctcaggctcgtaaggttattaatggtgttgttcgtcgttatggttctcctgctcgtattcatattgagactgctcgtgaggttggtaagtcttttaaggatcgtaaggagattgagaagcgtcaggaggagaatcgtaaggatcgtgagaaggctgctgctaagtttcgtgagtattttcctaattttgttggtgagcctaagtctaaggatattcttaagcttcgtctttatgagcagcagcatggtaagtgtctttattctggtaaggagattaatcttggtcgtcttaatgagaagggttatgttgagattgatgctgctcttcctttttctcgtacttgggatgattcttttaataataaggttcttgttcttggttctgagaatcagaataagggtaatcagactccttatgagtattttaatggtaaggataattctcgtgagtggcaggagtttaaggctcgtgttgagacttctcgttttcctcgttctaagaagcagcgtattcttcttcagaagtttgatgaggatggttttaaggagcgtaatcttaatgatactcgttatgttaatcgttttctttgtcagtttgttgctgatcgtatgcgtcttactggtaagggtaagaagcgtgtttttgcttctaatggtcagattactaatcttcttcgtggtttttggggtcttcgtaaggttcgtgctgagaatgatcgtcatcatgctcttgatgctgttgttgttgcttgttctactgttgctatgcagcagaagattactcgttttgttcgttataaggagatgaatgcttttgatggtaagactattgataaggagactggtgaggttcttcatcagaagactcattttcctcagccttgggagttttttgctcaggaggttatgattcgtgtttttggtaagcctgatggtaagcctgagtttgaggaggctgatactcttgagaagcttcgtactcttcttgctgagaagctttcttctcgtcctgaggctgttcatgagtatgttactcctctttttgtttctcgtgctcctaatcgtaagatgtctggtcagggtcatatggagactgttaagtctgctaagcgtcttgatgagggtgtttctgttcttcgtgttcctcttactcagcttaagcttaaggatcttgagaagatggttaatcgtgagcgtgagcctaagctttatgaggctcttaaggctcgtcttgaggctcataaggatgatcctgctaaggcttttgctgagcctttttataagtatgataaggctggtaatcgtactcagcaggttaaggctgttcgtgttgagcaggttcagaagactggtgtttgggttcgtaatcataatggtattgctgataatgctactatggttcgtgttgatgtttttgagaagggtgataagtattatcttgttcctatttattcttggcaggttgctaagggtattcttcctgatcgtgctgttgttcagggtaaggatgaggaggattggcagcttattgatgattcttttaattttaagttttctcttcatcctaatgatcttgttgaggttattactaagaaggctcgtatgtttggttattttgcttcttgtcatcgtggtactggtaatattaatattcgtattcatgatcttgatcataagattggtaagaatggtattcttgagggtattggtgttaagactgctctttcttttcagaagtatcagattgatgagcttggtaaggagattcgtccttgtcgtcttaagaagcgtcctcctgttcgttga

SEQ ID NO: 203 - DNA, 3249 bp, synthetic construct
  source 1..3249: mol_type = other DNA
  modified_base 3247: mod_base = OTHER; note = uracil
atggccgccttcaagcccaactccatcaactacatcctgggcctggacatcggcatcgcctccgtgggctgggccatggtggagatcgacgaggaggagaaccccatccggctgatcgacctgggcgtgcgggtgttcgagcgggccgaggtgcccaagaccggcgactccctggccatggcccggcggctggcccggtccgtgcggcggctgacccggcggcgggcccaccggctgctgcggacccggcggctgctgaagcgggagggcgtgctgcaggccgccaacttcgacgagaacggcctgatcaagtccctgcccaacaccccctggcagctgcgggccgccgccctggaccggaagctgacccccctggagtggtccgccgtgctgctgcacctgatcaagcaccggggctacctgtcccagcggaagaacgagggcgagaccgccgacaaggagctgggcgccctgctgaagggcgtggccggcaacgcccacgccctgcagaccggcgacttccggacccccgccgagctggccctgaacaagttcgagaaggagtccggccacatccggaaccagcggtccgactactcccacaccttctcccggaaggacctgcaggccgagctgatcctgctgttcgagaagcagaaggagttcggcaacccccacgtgtccggcggcctgaaggagggcatcgagaccctgctgatgacccagcggcccgccctgtccggcgacgccgtgcagaagatgctgggccactgcaccttcgagcccgccgagcccaaggccgccaagaacacctacaccgccgagcggttcatctggctgaccaagctgaacaacctgcggatcctggagcagggctccgagcggcccctgaccgacaccgagcgggccaccctgatggacgagccctaccggaagtccaagctgacctacgcccaggcccggaagctgctgggcctggaggacaccgccttcttcaagggcctgcggtacggcaaggacaacgccgaggcctccaccctgatggagatgaaggcctaccacgccatctcccgggccctggagaaggagggcctgaaggacaagaagtcccccctgaacctgtcccccgagctgcaggacgagatcggcaccgccttctccctgttcaagaccgacgaggacatcaccggccggctgaaggaccggatccagcccgagatcctggaggccctgctgaagcacatctccttcgacaagttcgtgcagatctccctgaaggccctgcggcggatcgtgcccctgatggagcagggcaagcggtacgacgaggcctgcgccgagatctacggcgaccactacggcaagaagaacaccgaggagaagatctacctgccccccatccccgccgacgagatccggaaccccgtggtgctgcgggccctgtcccaggcccggaaggtgatcaacggcgtggtgcggcggtacggctcccccgcccggatccacatcgagaccgcccgggaggtgggcaagtccttcaaggaccggaaggagatcgagaagcggcaggaggagaaccggaaggaccgggagaaggccgccgccaagttccgggagtacttccccaacttcgtgggcgagcccaagtccaaggacatcctgaagctgcggctgtacgagcagcagcacggcaagtgcctgtactccggcaaggagatcaacctgggccggctgaacgagaagggctacgtggagatcgacgccgccctgcccttctcccggacctgggacgactccttcaacaacaaggtgctggtgctgggctccgagaaccagaacaagggcaaccagaccccctacgagtacttcaacggcaaggacaactcccgggagtggcaggagttcaaggcccgggtggagacctcccggttcccccggtccaagaagcagcggatcctgctgcagaagttcgacgaggacggcttcaaggagcggaacctgaacgacacccggtacgtgaaccggttcctgtgccagttcgtggccgaccggatgcggctgaccggcaagggcaagaagcgggtgttcgcctccaacggccagatcaccaacctgctgcggggcttctggggcctgcggaaggtgcgggccgagaacgaccggcaccacgccctggacgccgtggtggtggcctgctccaccgtggccatgcagcagaagatcacccggttcgtgcggtacaaggagatgaacgccttcgacggcaagaccatcgacaaggagaccggcgaggtgctgcaccagaagacccacttcccccagccctgggagttcttcgcccaggaggtgatgatccgggtgttcggcaagcccgacggcaagcccgagttcgaggaggccgacaccctggagaagctgcggaccctgctggccgagaagctgtcctcccggcccgaggccgtgcacgagtacgtgacccccctgttcgtgtcccgggcccccaaccggaagatgtccggccagggccacatggagaccgtgaagtccgccaagcggctggacgagggcgtgtccgtgctgcgggtgcccctgacccagctgaagctgaaggacctggagaagatggtgaaccgggagcgggagcccaagctgtacgaggccctgaaggcccggctggaggcccacaaggacgaccccgccaaggccttcgccgagcccttctacaagtacgacaaggccggcaaccggacccagcaggtgaaggccgtgcgggtggagcaggtgcagaagaccggcgtgtgggtgcggaaccacaacggcatcgccgacaacgccaccatggtgcgggtggacgtgttcgagaagggcgacaagtactacctggtgcccatctactcctggcaggtggccaagggcatcctgcccgaccgggccgtggtgcagggcaaggacgaggaggactggcagctgatcgacgactccttcaacttcaagttctccctgcaccccaacgacctggtggaggtgatcaccaagaaggcccggatgttcggctacttcgcctcctgccaccggggcaccggcaacatcaacatccggatccacgacctggaccacaagatcggcaagaacggcatcctggagggcatcggcgtgaagaccgccctgtccttccagaagtaccagatcgacgagctgggcaaggagatccggccctgccggctgaagaagcggccccccgtgcggtga

SEQ ID NO: 204 - DNA, 3249 bp, synthetic construct
  source 1..3249: mol_type = other DNA
  modified_base 3247: mod_base = OTHER; note = uracil
atggcagcattcaaaccaaactcaatcaactacatcctaggactagacatcggaatcgcatcagtaggatgagcaatggtagaaatcgacgaagaagaaaacccaatccgactaatcgacctaggagtacgagtattcgaacgagcagaagtaccaaaaacaggagactcactagcaatggcacgacgactagcacgatcagtacgacgactaacacgacgacgagcacaccgactactacgaacacgacgactactaaaacgagaaggagtactacaagcagcaaacttcgacgaaaacggactaatcaaatcactaccaaacacaccatgacaactacgagcagcagcactagaccgaaaactaacaccactagaatgatcagcagtactactacacctaatcaaacaccgaggatacctatcacaacgaaaaaacgaaggagaaacagcagacaaagaactaggagcactactaaaaggagtagcaggaaacgcacacgcactacaaacaggagacttccgaacaccagcagaactagcactaaacaaattcgaaaaagaatcaggacacatccgaaaccaacgatcagactactcacacacattctcacgaaaagacctacaagcagaactaatcctactattcgaaaaacaaaaagaattcggaaacccacacgtatcaggaggactaaaagaaggaatcgaaacactactaatgacacaacgaccagcactatcaggagacgcagtacaaaaaatgctaggacactgcacattcgaaccagcagaaccaaaagcagcaaaaaacacatacacagcagaacgattcatctgactaacaaaactaaacaacctacgaatcctagaacaaggatcagaacgaccactaacagacacagaacgagcaacactaatggacgaaccataccgaaaatcaaaactaacatacgcacaagcacgaaaactactaggactagaagacacagcattcttcaaaggactacgatacggaaaagacaacgcagaagcatcaacactaatggaaatgaaagcataccacgcaatctcacgagcactagaaaaagaaggactaaaagacaaaaaatcaccactaaacctatcaccagaactacaagacgaaatcggaacagcattctcactattcaaaacagacgaagacatcacaggacgactaaaagaccgaatccaaccagaaatcctagaagcactactaaaacacatctcattcgacaaattcgtacaaatctcactaaaagcactacgacgaatcgtaccactaatggaacaaggaaaacgatacgacgaagcatgcgcagaaatctacggagaccactacggaaaaaaaaacacagaagaaaaaatctacctaccaccaatcccagcagacgaaatccgaaacccagtagtactacgagcactatcacaagcacgaaaagtaatcaacggagtagtacgacgatacggatcaccagcacgaatccacatcgaaacagcacgagaagtaggaaaatcattcaaagaccgaaaagaaatcgaaaaacgacaagaagaaaaccgaaaagaccgagaaaaagcagcagcaaaattccgagaatacttcccaaacttcgtaggagaaccaaaatcaaaagacatcctaaaactacgactatacgaacaacaacacggaaaatgcctatactcaggaaaagaaatcaacctaggacgactaaacgaaaaaggatacgtagaaatcgacgcagcactaccattctcacgaacatgagacgactcattcaacaacaaagtactagtactaggatcagaaaaccaaaacaaaggaaaccaaacaccatacgaatacttcaacggaaaagacaactcacgagaatgacaagaattcaaagcacgagtagaaacatcacgattcccacgatcaaaaaaacaacgaatcctactacaaaaattcgacgaagacggattcaaagaacgaaacctaaacgacacacgatacgtaaaccgattcctatgccaattcgtagcagaccgaatgcgactaacaggaaaaggaaaaaaacgagtattcgcatcaaacggacaaatcacaaacctactacgaggattctgaggactacgaaaagtacgagcagaaaacgaccgacaccacgcactagacgcagtagtagtagcatgctcaacagtagcaatgcaacaaaaaatcacacgattcgtacgatacaaagaaatgaacgcattcgacggaaaaacaatcgacaaagaaacaggagaagtactacaccaaaaaacacacttcccacaaccatgagaattcttcgcacaagaagtaatgatccgagtattcggaaaaccagacggaaaaccagaattcgaagaagcagacacactagaaaaactacgaacactactagcagaaaaactatcatcacgaccagaagcagtacacgaatacgtaacaccactattcgtatcacgagcaccaaaccgaaaaatgtcaggacaaggacacatggaaacagtaaaatcagcaaaacgactagacgaaggagtatcagtactacgagtaccactaacacaactaaaactaaaagacctagaaaaaatggtaaaccgagaacgagaaccaaaactatacgaagcactaaaagcacgactagaagcacacaaagacgacccagcaaaagcattcgcagaaccattctacaaatacgacaaagcaggaaaccgaacacaacaagtaaaagcagtacgagtagaacaagtacaaaaaacaggagtatgagtacgaaaccacaacggaatcgcagacaacgcaacaatggtacgagtagacgtattcgaaaaaggagacaaatactacctagtaccaatctactcatgacaagtagcaaaaggaatcctaccagaccgagcagtagtacaaggaaaagacgaagaagactgacaactaatcgacgactcattcaacttcaaattctcactacacccaaacgacctagtagaagtaatcacaaaaaaagcacgaatgttcggatacttcgcatcatgccaccgaggaacaggaaacatcaacatccgaatccacgacctagaccacaaaatcggaaaaaacggaatcctagaaggaatcggagtaaaaacagcactatcattccaaaaataccaaatcgacgaactaggaaaagaaatccgaccatgccgactaaaaaaacgaccaccagtacgataa

SEQ ID NO: 205 - protein, 1082 aa, synthetic construct; identical to SEQ ID NO: 160

SEQ ID NO: 206 - DNA, 3243 bp, synthetic construct
  source 1..3243: mol_type = other DNA
gctgcttttaagcctaatcctattaattatattcttggtcttgatattggtattgcttctgttggttgggctatggttgagattgatgaggaggagaatcctattcgtcttattgatcttggtgttcgtgtttttgagcgtgctgaggttcctaagactggtgattctcttgctatggctcgtcgtcttgctcgttctgttcgtcgtcttactcgtcgtcgtgctcatcgtcttcttcgtgctcgtcgtcttcttaagcgtgagggtgttcttcaggctgctgattttgatgagaatggtcttattaagtctcttcctaatactccttggcagcttcgtgctgctgctcttgatcgtaagcttactcctcttgagtggtctgctgttcttcttcatcttattaagcatcgtggttatctttctcagcgtaagaatgagggtgagactgctgataaggagcttggtgctcttcttaagggtgttgctaataatgctcatgctcttcagactggtgattttcgtactcctgctgagcttgctcttaataagtttgagaaggagtctggtcatattcgtaatcagcgtggtgattattctcatactttttctcgtaaggatcttcaggctgagcttattcttctttttgagaagcagaaggagtttggtaatcctcatgtttctggtggtcttaaggagggtattgagactcttcttatgactcagcgtcctgctctttctggtgatgctgttcagaagatgcttggtcattgtacttttgagcctgctgagcctaaggctgctaagaatacttatactgctgagcgttttatttggcttactaagcttaataatcttcgtattcttgagcagggttctgagcgtcctcttactgatactgagcgtgctactcttatggatgagccttatcgtaagtctaagcttacttatgctcaggctcgtaagcttcttggtcttgaggatactgctttttttaagggtcttcgttatggtaaggataatgctgaggcttctactcttatggagatgaaggcttatcatgctatttctcgtgctcttgagaaggagggtcttaaggataagaagtctcctcttaatctttcttctgagcttcaggatgagattggtactgctttttctctttttaagactgatgaggatattactggtcgtcttaaggatcgtgttcagcctgagattcttgaggctcttcttaagcatatttcttttgataagtttgttcagatttctcttaaggctcttcgtcgtattgttcctcttatggagcagggtaagcgttatgatgaggcttgtgctgagatttatggtgatcattatggtaagaagaatactgaggagaagatttatcttcctcctattcctgctgatgagattcgtaatcctgttgttcttcgtgctctttctcaggctcgtaaggttattaatggtgttgttcgtcgttatggttctcctgctcgtattcatattgagactgctcgtgaggttggtaagtcttttaaggatcgtaaggagattgagaagcgtcaggaggagaatcgtaaggatcgtgagaaggctgctgctaagtttcgtgagtattttcctaattttgttggtgagcctaagtctaaggatattcttaagcttcgtctttatgagcagcagcatggtaagtgtctttattctggtaaggagattaatcttgttcgtcttaatgagaagggttatgttgagattgatcatgctcttcctttttctcgtacttgggatgattcttttaataataaggttcttgttcttggttctgagaatcagaataagggtaatcagactccttatgagtattttaatggtaaggataattctcgtgagtggcaggagtttaaggctcgtgttgagacttctcgttttcctcgttctaagaagcagcgtattcttcttcagaagtttgatgaggatggttttaaggagtgtaatcttaatgatactcgttatgttaatcgttttctttgtcagtttgttgctgatcatattcttcttactggtaagggtaagcgtcgtgtttttgcttctaatggtcagattactaatcttcttcgtggtttttggggtcttcgtaaggttcgtgctgagaatgatcgtcatcatgctcttgatgctgttgttgttgcttgttctactgttgctatgcagcagaagattactcgttttgttcgttataaggagatgaatgcttttgatggtaagactattgataaggagactggtaaggttcttcatcagaagactcattttcctcagccttgggagttttttgctcaggaggttatgattcgtgtttttggtaagcctgatggtaagcctgagtttgaggaggctgatactcctgagaagcttcgtactcttcttgctgagaagctttcttctcgtcctgaggctgttcatgagtatgttactcctctttttgtttctcgtgctcctaatcgtaagatgtctggtgctcataaggatactcttcgttctgctaagcgttttgttaagcataatgagaagatttctgttaagcgtgtttggcttactgagattaagcttgctgatcttgagaatatggttaattataagaatggtcgtgagattgagctttatgaggctcttaaggctcgtcttgaggcttatggtggtaatgctaagcaggcttttgatcctaaggataatcctttttataagaagggtggtcagcttgttaaggctgttcgtgttgagaagactcaggagtctggtgttcttcttaataagaagaatgcttatactattgctgataatggtgatatggttcgtgttgatgttttttgtaaggttgataagaagggtaagaatcagtattttattgttcctatttatgcttggcaggttgctgagaatattcttcctgatattgattgtaagggttatcgtattgatgattcttatactttttgtttttctcttcataagtatgatcttattgcttttcagaaggatgagaagtctaaggttgagtttgcttattatattaattgtgattcttctaatggtcgtttttatcttgcttggcatgataagggttctaaggagcagcagtttcgtatttctactcagaatcttgttcttattcagaagtatcaggttaatgagcttggtaaggagattcgtccttgtcgtcttaagaagcgtcctcctgttcgt

SEQ ID NO: 207 - DNA, 3243 bp, synthetic construct
  source 1..3243: mol_type = other DNA
gccgccttcaagcccaaccccatcaactacatcctgggcctggacatcggcatcgcctccgtgggctgggccatggtggagatcgacgaggaggagaaccccatccggctgatcgacctgggcgtgcgggtgttcgagcgggccgaggtgcccaagaccggcgactccctggccatggcccggcggctggcccggtccgtgcggcggctgacccggcggcgggcccaccggctgctgcgggcccggcggctgctgaagcgggagggcgtgctgcaggccgccgacttcgacgagaacggcctgatcaagtccctgcccaacaccccctggcagctgcgggccgccgccctggaccggaagctgacccccctggagtggtccgccgtgctgctgcacctgatcaagcaccggggctacctgtcccagcggaagaacgagggcgagaccgccgacaaggagctgggcgccctgctgaagggcgtggccaacaacgcccacgccctgcagaccggcgacttccggacccccgccgagctggccctgaacaagttcgagaaggagtccggccacatccggaaccagcggggcgactactcccacaccttctcccggaaggacctgcaggccgagctgatcctgctgttcgagaagcagaaggagttcggcaacccccacgtgtccggcggcctgaaggagggcatcgagaccctgctgatgacccagcggcccgccctgtccggcgacgccgtgcagaagatgctgggccactgcaccttcgagcccgccgagcccaaggccgccaagaacacctacaccgccgagcggttcatctggctgaccaagctgaacaacctgcggatcctggagcagggctccgagcggcccctgaccgacaccgagcgggccaccctgatggacgagccctaccggaagtccaagctgacctacgcccaggcccggaagctgctgggcctggaggacaccgccttcttcaagggcctgcggtacggcaaggacaacgccgaggcctccaccctgatggagatgaaggcctaccacgccatctcccgggccctggagaaggagggcctgaaggacaagaagtcccccctgaacctgtcctccgagctgcaggacgagatcggcaccgccttctccctgttcaagaccgacgaggacatcaccggccggctgaaggaccgggtgcagcccgagatcctggaggccctgctgaagcacatctccttcgacaagttcgtgcagatctccctgaaggccctgcggcggatcgtgcccctgatggagcagggcaagcggtacgacgaggcctgcgccgagatctacggcgaccactacggcaagaagaacaccgaggagaagatctacctgccccccatccccgccgacgagatccggaaccccgtggtgctgcgggccctgtcccaggcccggaaggtgatcaacggcgtggtgcggcggtacggctcccccgcccggatccacatcgagaccgcccgggaggtgggcaagtccttcaaggaccggaaggagatcgagaagcggcaggaggagaaccggaaggaccgggagaaggccgccgccaagttccgggagtacttccccaacttcgtgggcgagcccaagtccaaggacatcctgaagctgcggctgtacgagcagcagcacggcaagtgcctgtactccggcaaggagatcaacctggtgcggctgaacgagaagggctacgtggagatcgaccacgccctgcccttctcccggacctgggacgactccttcaacaacaaggtgctggtgctgggctccgagaaccagaacaagggcaaccagaccccctacgagtacttcaacggcaaggacaactcccgggagtggcaggagttcaaggcccgggtggagacctcccggttcccccggtccaagaagcagcggatcctgctgcagaagttcgacgaggacggcttcaaggagtgcaacctgaacgacacccggtacgtgaaccggttcctgtgccagttcgtggccgaccacatcctgctgaccggcaagggcaagcggcgggtgttcgcctccaacggccagatcaccaacctgctgcggggcttctggggcctgcggaaggtgcgggccgagaacgaccggcaccacgccctggacgccgtggtggtggcctgctccaccgtggccatgcagcagaagatcacccggttcgtgcggtacaaggagatgaacgccttcgacggcaagaccatcgacaaggagaccggcaaggtgctgcaccagaagacccacttcccccagccctgggagttcttcgcccaggaggtgatgatccgggtgttcggcaagcccgacggcaagcccgagttcgaggaggccgacacccccgagaagctgcggaccctgctggccgagaagctgtcctcccggcccgaggccgtgcacgagtacgtgacccccctgttcgtgtcccgggcccccaaccggaagatgtccggcgcccacaaggacaccctgcggtccgccaagcggttcgtgaagcacaacgagaagatctccgtgaagcgggtgtggctgaccgagatcaagctggccgacctggagaacatggtgaactacaagaacggccgggagatcgagctgtacgaggccctgaaggcccggctggaggcctacggcggcaacgccaagcaggccttcgaccccaaggacaaccccttctacaagaagggcggccagctggtgaaggccgtgcgggtggagaagacccaggagtccggcgtgctgctgaacaagaagaacgcctacaccatcgccgacaacggcgacatggtgcgggtggacgtgttctgcaaggtggacaagaagggcaagaaccagtacttcatcgtgcccatctacgcctggcaggtggccgagaacatcctgcccgacatcgactgcaagggctaccggatcgacgactcctacaccttctgcttctccctgcacaagtacgacctgatcgccttccagaaggacgagaagtccaaggtggagttcgcctactacatcaactgcgactcctccaacggccggttctacctggcctggcacgacaagggctccaaggagcagcagttccggatctccacccagaacctggtgctgatccagaagtaccaggtgaacgagctgggcaaggagatccggccctgccggctgaagaagcggccccccgtgcgg

SEQ ID NO: 208 - DNA, 3243 bp, synthetic construct
  source 1..3243: mol_type = other DNA
gcagcattcaaaccaaacccaatcaactacatcctaggactagacatcggaatcgcatcagtaggatgagcaatggtagaaatcgacgaagaagaaaacccaatccgactaatcgacctaggagtacgagtattcgaacgagcagaagtaccaaaaacaggagactcactagcaatggcacgacgactagcacgatcagtacgacgactaacacgacgacgagcacaccgactactacgagcacgacgactactaaaacgagaaggagtactacaagcagcagacttcgacgaaaacggactaatcaaatcactaccaaacacaccatgacaactacgagcagcagcactagaccgaaaactaacaccactagaatgatcagcagtactactacacctaatcaaacaccgaggatacctatcacaacgaaaaaacgaaggagaaacagcagacaaagaactaggagcactactaaaaggagtagcaaacaacgcacacgcactacaaacaggagacttccgaacaccagcagaactagcactaaacaaattcgaaaaagaatcaggacacatccgaaaccaacgaggagactactcacacacattctcacgaaaagacctacaagcagaactaatcctactattcgaaaaacaaaaagaattcggaaacccacacgtatcaggaggactaaaagaaggaatcgaaacactactaatgacacaacgaccagcactatcaggagacgcagtacaaaaaatgctaggacactgcacattcgaaccagcagaaccaaaagcagcaaaaaacacatacacagcagaacgattcatctgactaacaaaactaaacaacctacgaatcctagaacaaggatcagaacgaccactaacagacacagaacgagcaacactaatggacgaaccataccgaaaatcaaaactaacatacgcacaagcacgaaaactactaggactagaagacacagcattcttcaaaggactacgatacggaaaagacaacgcagaagcatcaacactaatggaaatgaaagcataccacgcaatctcacgagcactagaaaaagaaggactaaaagacaaaaaatcaccactaaacctatcatcagaactacaagacgaaatcggaacagcattctcactattcaaaacagacgaagacatcacaggacgactaaaagaccgagtacaaccagaaatcctagaagcactactaaaacacatctcattcgacaaattcgtacaaatctcactaaaagcactacgacgaatcgtaccactaatggaacaaggaaaacgatacgacgaagcatgcgcagaaatctacggagaccactacggaaaaaaaaacacagaagaaaaaatctacctaccaccaatcccagcagacgaaatccgaaacccagtagtactacgagcactatcacaagcacgaaaagtaatcaacggagtagtacgacgatacggatcaccagcacgaatccacatcgaaacagcacgagaagtaggaaaatcattcaaagaccgaaaagaaatcgaaaaacgacaagaagaaaaccgaaaagaccgagaaaaagcagcagcaaaattccgagaatacttcccaaacttcgtaggagaaccaaaatcaaaagacatcctaaaactacgactatacgaacaacaacacggaaaatgcctatactcaggaaaagaaatcaacctagtacgactaaacgaaaaaggatacgtagaaatcgaccacgcactaccattctcacgaacatgagacgactcattcaacaacaaagtactagtactaggatcagaaaaccaaaacaaaggaaaccaaacaccatacgaatacttcaacggaaaagacaactcacgagaatgacaagaattcaaagcacgagtagaaacatcacgattcccacgatcaaaaaaacaacgaatcctactacaaaaattcgacgaagacggattcaaagaatgcaacctaaacgacacacgatacgtaaaccgattcctatgccaattcgtagcagaccacatcctactaacaggaaaaggaaaacgacgagtattcgcatcaaacggacaaatcacaaacctactacgaggattctgaggactacgaaaagtacgagcagaaaacgaccgacaccacgcactagacgcagtagtagtagcatgctcaacagtagcaatgcaacaaaaaatcacacgattcgtacgatacaaagaaatgaacgcattcgacggaaaaacaatcgacaaagaaacaggaaaagtactacaccaaaaaacacacttcccacaaccatgagaattcttcgcacaagaagtaatgatccgagtattcggaaaaccagacggaaaaccagaattcgaagaagcagacacaccagaaaaactacgaacactactagcagaaaaactatcatcacgaccagaagcagtacacgaatacgtaacaccactattcgtatcacgagcaccaaaccgaaaaatgtcaggagcacacaaagacacactacgatcagcaaaacgattcgtaaaacacaacgaaaaaatctcagtaaaacgagtatgactaacagaaatcaaactagcagacctagaaaacatggtaaactacaaaaacggacgagaaatcgaactatacgaagcactaaaagcacgactagaagcatacggaggaaacgcaaaacaagcattcgacccaaaagacaacccattctacaaaaaaggaggacaactagtaaaagcagtacgagtagaaaaaacacaagaatcaggagtactactaaacaaaaaaaacgcatacacaatcgcagacaacggagacatggtacgagtagacgtattctgcaaagtagacaaaaaaggaaaaaaccaatacttcatcgtaccaatctacgcatgacaagtagcagaaaacatcctaccagacatcgactgcaaaggataccgaatcgacgactcatacacattctgcttctcactacacaaatacgacctaatcgcattccaaaaagacgaaaaatcaaaagtagaattcgcatactacatcaactgcgactcatcaaacggacgattctacctagcatgacacgacaaaggatcaaaagaacaacaattccgaatctcaacacaaaacctagtactaatccaaaaataccaagtaaacgaactaggaaaagaaatccgaccatgccgactaaaaaaacgaccaccagtacga

SEQ ID NO: 209 - DNA, 3249 bp, synthetic construct
  source 1..3249: mol_type = other DNA
  modified_base 3247: mod_base = OTHER; note = uracil
atggctgcttttaagcctaatcctattaattatattcttggtcttgatattggtattgcttctgttggttgggctatggttgagattgatgaggaggagaatcctattcgtcttattgatcttggtgttcgtgtttttgagcgtgctgaggttcctaagactggtgattctcttgctatggctcgtcgtcttgctcgttctgttcgtcgtcttactcgtcgtcgtgctcatcgtcttcttcgtgctcgtcgtcttcttaagcgtgagggtgttcttcaggctgctgattttgatgagaatggtcttattaagtctcttcctaatactccttggcagcttcgtgctgctgctcttgatcgtaagcttactcctcttgagtggtctgctgttcttcttcatcttattaagcatcgtggttatctttctcagcgtaagaatgagggtgagactgctgataaggagcttggtgctcttcttaagggtgttgctaataatgctcatgctcttcagactggtgattttcgtactcctgctgagcttgctcttaataagtttgagaaggagtctggtcatattcgtaatcagcgtggtgattattctcatactttttctcgtaaggatcttcaggctgagcttattcttctttttgagaagcagaaggagtttggtaatcctcatgtttctggtggtcttaaggagggtattgagactcttcttatgactcagcgtcctgctctttctggtgatgctgttcagaagatgcttggtcattgtacttttgagcctgctgagcctaaggctgctaagaatacttatactgctgagcgttttatttggcttactaagcttaataatcttcgtattcttgagcagggttctgagcgtcctcttactgatactgagcgtgctactcttatggatgagccttatcgtaagtctaagcttacttatgctcaggctcgtaagcttcttggtcttgaggatactgctttttttaagggtcttcgttatggtaaggataatgctgaggcttctactcttatggagatgaaggcttatcatgctatttctcgtgctcttgagaaggagggtcttaaggataagaagtctcctcttaatctttcttctgagcttcaggatgagattggtactgctttttctctttttaagactgatgaggatattactggtcgtcttaaggatcgtgttcagcctgagattcttgaggctcttcttaagcatatttcttttgataagtttgttcagatttctcttaaggctcttcgtcgtattgttcctcttatggagcagggtaagcgttatgatgaggcttgtgctgagatttatggtgatcattatggtaagaagaatactgaggagaagatttatcttcctcctattcctgctgatgagattcgtaatcctgttgttcttcgtgctctttctcaggctcgtaaggttattaatggtgttgttcgtcgttatggttctcctgctcgtattcatattgagactgctcgtgaggttggtaagtcttttaaggatcgtaaggagattgagaagcgtcaggaggagaatcgtaaggatcgtgagaaggctgctgctaagtttcgtgagtattttcctaattttgttggtgagcctaagtctaaggatattcttaagcttcgtctttatgagcagcagcatggtaagtgtctttattctggtaaggagattaatcttgttcgtcttaatgagaagggttatgttgagattgatcatgctcttcctttttctcgtacttgggatgattcttttaataataaggttcttgttcttggttctgagaatcagaataagggtaatcagactccttatgagtattttaatggtaaggataattctcgtgagtggcaggagtttaaggctcgtgttgagacttctcgttttcctcgttctaagaagcagcgtattcttcttcagaagtttgatgaggatggttttaaggagtgtaatcttaatgatactcgttatgttaatcgttttctttgtcagtttgttgctgatcatattcttcttactggtaagggtaagcgtcgtgtttttgcttctaatggtcagattactaatcttcttcgtggtttttggggtcttcgtaaggttcgtgctgagaatgatcgtcatcatgctcttgatgctgttgttgttgcttgttctactgttgctatgcagcagaagattactcgttttgttcgttataaggagatgaatgcttttgatggtaagactattgataaggagactggtaaggttcttcatcagaagactcattttcctcagccttgggagttttttgctcaggaggttatgattcgtgtttttggtaagcctgatggtaagcctgagtttgaggaggctgatactcctgagaagcttcgtactcttcttgctgagaagctttcttctcgtcctgaggctgttcatgagtatgttactcctctttttgtttctcgtgctcctaatcgtaagatgtctggtgctcataaggatactcttcgttctgctaagcgttttgttaagcataatgagaagatttctgttaagcgtgtttggcttactgagattaagcttgctgatcttgagaatatggttaattataagaatggtcgtgagattgagctttatgaggctcttaaggctcgtcttgaggcttatggtggtaatgctaagcaggcttttgatcctaaggataatcctttttataagaagggtggtcagcttgttaaggctgttcgtgttgagaagactcaggagtctggtgttcttcttaataagaagaatgcttatactattgctgataatggtgatatggttcgtgttgatgttttttgtaaggttgataagaagggtaagaatcagtattttattgttcctatttatgcttggcaggttgctgagaatattcttcctgatattgattgtaagggttatcgtattgatgattcttatactttttgtttttctcttcataagtatgatcttattgcttttcagaaggatgagaagtctaaggttgagtttgcttattatattaattgtgattcttctaatggtcgtttttatcttgcttggcatgataagggttctaaggagcagcagtttcgtatttctactcagaatcttgttcttattcagaagtatcaggttaatgagcttggtaaggagattcgtccttgtcgtcttaagaagcgtcctcctgttcgttga

SEQ ID NO: 210 - DNA, 3249 bp, synthetic construct
  source 1..3249: mol_type = other DNA
  modified_base 3247: mod_base = OTHER; note = uracil
atggccgccttcaagcccaaccccatcaactacatcctgggcctggacatcggcatcgcctccgtgggctgggccatggtggagatcgacgaggaggagaaccccatccggctgatcgacctgggcgtgcgggtgttcgagcgggccgaggtgcccaagaccggcgactccctggccatggcccggcggctggcccggtccgtgcggcggctgacccggcggcgggcccaccggctgctgcgggcccggcggctgctgaagcgggagggcgtgctgcaggccgccgacttcgacgagaacggcctgatcaagtccctgcccaacaccccctggcagctgcgggccgccgccctggaccggaagctgacccccctggagtggtccgccgtgctgctgcacctgatcaagcaccggggctacctgtcccagcggaagaacgagggcgagaccgccgacaaggagctgggcgccctgctgaagggcgtggccaacaacgcccacgccctgcagaccggcgacttccggacccccgccgagctggccctgaacaagttcgagaaggagtccggccacatccggaaccagcggggcgactactcccacaccttctcccggaaggacctgcaggccgagctgatcctgctgttcgagaagcagaaggagttcggcaacccccacgtgtccggcggcctgaaggagggcatcgagaccctgctgatgacccagcggcccgccctgtccggcgacgccgtgcagaagatgctgggccactgcaccttcgagcccgccgagcccaaggccgccaagaacacctacaccgccgagcggttcatctggctgaccaagctgaacaacctgcggatcctggagcagggctccgagcggcccctgaccgacaccgagcgggccaccctgatggacgagccctaccggaagtccaagctgacctacgcccaggcccggaagctgctgggcctggaggacaccgccttcttcaagggcctgcggtacggcaaggacaacgccgaggcctccaccctgatggagatgaaggcctaccacgccatctcccgggccctggagaaggagggcctgaaggacaagaagtcccccctgaacctgtcctccgagctgcaggacgagatcggcaccgccttctccctgttcaagaccgacgaggacatcaccggccggctgaaggaccgggtgcagcccgagatcctggaggccctgctgaagcacatctccttcgacaagttcgtgcagatctccctgaaggccctgcggcggatcgtgcccctgatggagcagggcaagcggtacgacgaggcctgcgccgagatctacggcgaccactacggcaagaagaacaccgaggagaagatctacctgccccccatccccgccgacgagatccggaaccccgtggtgctgcgggccctgtcccaggcccggaaggtgatcaacggcgtggtgcggcggtacggctcccccgcccggatccacatcgagaccgcccgggaggtgggcaagtccttcaaggaccggaaggagatcgagaagcggcaggaggagaaccggaaggaccgggagaaggccgccgccaagttccgggagtacttccccaacttcgtgggcgagcccaagtccaaggacatcctgaagctgcggctgtacgagcagcagcacggcaagtgcctgtactccggcaaggagatcaacctggtgcggctgaacgagaagggctacgtggagatcgaccacgccctgcccttctcccggacctgggacgactccttcaacaacaaggtgctggtgctgggctccgagaaccagaacaagggcaaccagaccccctacgagtacttcaacggcaaggacaactcccgggagtggcaggagttcaaggcccgggtggagacctcccggttcccccggtccaagaagcagcggatcctgctgcagaagttcgacgaggacggcttcaaggagtgcaacctgaacgacacccggtacgtgaaccggttcctgtgccagttcgtggccgaccacatcctgctgaccggcaagggcaagcggcgggtgttcgcctccaacggccagatcaccaacctgctgcggggcttctggggcctgcggaaggtgcgggccgagaacgaccggcaccacgccctggacgccgtggtggtggcctgctccaccgtggccatgcagcagaagatcacccggttcgtgcggtacaaggagatgaacgccttcgacggcaagaccatcgacaaggagaccggcaaggtgctgcaccagaagacccacttcccccagccctgggagttcttcgcccaggaggtgatgatccgggtgttcggcaagcccgacggcaagcccgagttcgaggaggccgacacccccgagaagctgcggaccctgctggccgagaagctgtcctcccggcccgaggccgtgcacgagtacgtgacccccctgttcgtgtcccgggcccccaaccggaagatgtccggcgcccacaaggacaccctgcggtccgccaagcggttcgtgaagcacaacgagaagatctccgtgaagcgggtgtggctgaccgagatcaagctggccgacctggagaacatggtgaactacaagaacggccgggagatcgagctgtacgaggccctgaaggcccggctggaggcctacggcggcaacgccaagcaggccttcgaccccaaggacaaccccttctacaagaagggcggccagctggtgaaggccgtgcgggtggagaagacccaggagtccggcgtgctgctgaacaagaagaacgcctacaccatcgccgacaacggcgacatggtgcgggtggacgtgttctgcaaggtggacaagaagggcaagaaccagtacttcatcgtgcccatctacgcctggcaggtggccgagaacatcctgcccgacatcgactgcaagggctaccggatcgacgactcctacaccttctgcttctccctgcacaagtacgacctgatcgccttccagaaggacgagaagtccaaggtggagttcgcctactacatcaactgcgactcctccaacggccggttctacctggcctggcacgacaagggctccaaggagcagcagttccggatctccacccagaacctggtgctgatccagaagtaccaggtgaacgagctgggcaaggagatccggccctgccggctgaagaagcggccccccgtgcggtga

SEQ ID NO: 211 - DNA, 3249 bp, synthetic construct
  source 1..3249: mol_type = other DNA
  modified_base 3247: mod_base = OTHER; note = uracil
atggcagcattcaaaccaaacccaatcaactacatcctaggactagacatcggaatcgcatcagtaggatgagcaatggtagaaatcgacgaagaagaaaacccaatccgactaatcgacctaggagtacgagtattcgaacgagcagaagtaccaaaaacaggagactcactagcaatggcacgacgactagcacgatcagtacgacgactaacacgacgacgagcacaccgactactacgagcacgacgactactaaaacgagaaggagtactacaagcagcagacttcgacgaaaacggactaatcaaatcactaccaaacacaccatgacaactacgagcagcagcactagaccgaaaactaacaccactagaatgatcagcagtactactacacctaatcaaacaccgaggatacctatcacaacgaaaaaacgaaggagaaacagcagacaaagaactaggagcactactaaaaggagtagcaaacaacgcacacgcactacaaacaggagacttccgaacaccagcagaactagcactaaacaaattcgaaaaagaatcaggacacatccgaaaccaacgaggagactactcacacacattctcacgaaaagacctacaagcagaactaatcctactattcgaaaaacaaaaagaattcggaaacccacacgtatcaggaggactaaaagaaggaatcgaaacactactaatgacacaacgaccagcactatcaggagacgcagtacaaaaaatgctaggacactgcacattcgaaccagcagaaccaaaagcagcaaaaaacacatacacagcagaacgattcatctgactaacaaaactaaacaacctacgaatcctagaacaaggatcagaacgaccactaacagacacagaacgagcaacactaatggacgaaccataccgaaaatcaaaactaacatacgcacaagcacgaaaactactaggactagaagacacagcattcttcaaaggactacgatacggaaaagacaacgcagaagcatcaacactaatggaaatgaaagcataccacgcaatctcacgagcactagaaaaagaaggactaaaagacaaaaaatcaccactaaacctatcatcagaactacaagacgaaatcggaacagcattctcactattcaaaacagacgaagacatcacaggacgactaaaagaccgagtacaaccagaaatcctagaagcactactaaaacacatctcattcgacaaattcgtacaaatctcactaaaagcactacgacgaatcgtaccactaatggaacaaggaaaacgatacgacgaagcatgcgcagaaatctacggagaccactacggaaaaaaaaacacagaagaaaaaatctacctaccaccaatcccagcagacgaaatccgaaacccagtagtactacgagcactatcacaagcacgaaaagtaatcaacggagtagtacgacgatacggatcaccagcacgaatccacatcgaaacagcacgagaagtaggaaaatcattcaaagaccgaaaagaaatcgaaaaacgacaagaagaaaaccgaaaagaccgagaaaaagcagcagcaaaattccgagaatacttcccaaacttcgtaggagaaccaaaatcaaaagacatcctaaaactacgactatacgaacaacaacacggaaaatgcctatactcaggaaaagaaatcaacctagtacgactaaacgaaaaaggatacgtagaaatcgaccacgcactaccattctcacgaacatgagacgactcattcaacaacaaagtactagtactaggatcagaaaaccaaaacaaaggaaaccaaacaccatacgaatacttcaacggaaaagacaactcacgagaatgacaagaattcaaagcacgagtagaaacatcacgattcccacgatcaaaaaaacaacgaatcctactacaaaaattcgacgaagacggattcaaagaatgcaacctaaacgacacacgatacgtaaaccgattcctatgccaattcgtagcagaccacatcctactaacaggaaaaggaaaacgacgagtattcgcatcaaacggacaaatcacaaacctactacgaggattctgaggactacgaaaagtacgagcagaaaacgaccgacaccacgcactagacgcagtagtagtagcatgctcaacagtagcaatgcaacaaaaaatcacacgattcgtacgatacaaagaaatgaacgcattcgacggaaaaacaatcgacaaagaaacaggaaaagtactacaccaaaaaacacacttcccacaaccatgagaattcttcgcacaagaagtaatgatccgagtattcggaaaaccagacggaaaaccagaattcgaagaagcagacacaccagaaaaactacgaacactactagcagaaaaactatcatcacgaccagaagcagtacacgaatacgtaacaccactattcgtatcacgagcaccaaaccgaaaaatgtcaggagcacacaaagacacactacgatcagcaaaacgattcgtaaaacacaacgaaaaaatctcagtaaaacgagtatgactaacagaaatcaaactagcagacctagaaaacatggtaaactacaaaaacggacgagaaatcgaactatacgaagcactaaaagcacgactagaagcatacggaggaaacgcaaaacaagcattcgacccaaaagacaacccattctacaaaaaaggaggacaactagtaaaagcagtacgagtagaaaaaacacaagaatcaggagtactactaaacaaaaaaaacgcatacacaatcgcagacaacggagacatggtacgagtagacgtattctgcaaagtagacaaaaaaggaaaaaaccaatacttcatcgtaccaatctacgcatgacaagtagcagaaaacatcctaccagacatcgactgcaaaggataccgaatcgacgactcatacacattctgcttctcactacacaaatacgacctaatcgcattccaaaaagacgaaaaatcaaaagtagaattcgcatactacatcaactgcgactcatcaaacggacgattctacctagcatgacacgacaaaggatcaaaagaacaacaattccgaatctcaacacaaaacctagtactaatccaaaaataccaagtaaacgaactaggaaaagaaatccgaccatgccgactaaaaaaacgaccaccagtacgataa

SEQ ID NO: 212 - protein, 1081 aa, synthetic construct
MAAFKPNPINYILGLDIGIASVGWAMVEIDEEENPIRLIDLGVRVFERAEVPKTGDSLAMARRLARSVRRLTRRRAHRLLRARRLLKREGVLQAADFDENGLIKSLPNTPWQLRAAALDRKLTPLEWSAVLLHLIKHRGYLSQRKNEGETADKELGALLKGVADNAHALQTGDFRTPAELALNKFEKECGHIRNQRGDYSHTFSRKDLQAELNLLFEKQKEFGNPHVSGGLKEGIETLLMTQRPALSGDAVQKMLGHCTFEPAEPKAAKNTYTAERFIWLTKLNNLRILEQGSERPLTDTERATLMDEPYRKSKLTYAQARKLLSLEDTAFFKGLRYGKDNAEASTLMEMKAYHTISRALEKEGLKDKKSPLNLSPELQDEIGTAFSLFKTDEDITGRLKDRIQPEILEALLKHISFDKFVQISLKALRRIVPLMEQGKRYDEACAEIYGDHYGKKNTEEKIYLPPIPADEIRNPVVLRALSQARKVINGVVRRYGSPARIHIETAREVGKSFKDRKEIEKRQEENRKDREKAAAKFREYFPNFVGEPKSKDILKLRLYEQQHGKCLYSGKEINLGRLNEKGYVEIDHALPFSRTWDDSFNNKVLVLGSENQNKGNQTPYEYFNGKDNSREWQEFKARVETSRFPRSKKQRILLQKFDEDGFKERNLNDTRYVNRFLCQFVADRMRLTGKGKKRVFASNGQITNLLRGFWGLRKVRAENDRHHALDAVVVACSTVAMQQKITRFVRYKEMNAFDGKTIDKETGEVLHQKTHFPQPWEFFAQEVMIRVFGKPDGKPEFEEADTPEKLRTLLAEKLSSRPEAVHEYVTPLFVSRAPNRKMSGQGHMETVKSAKRLDEGVSVLRVPLTQLKLKDLEKMVNREREPKLYEALKARLEAHKDDPAKAFAEPFYKYDKAGNRTQQVKAVRVEQVQKTGVWVRNHNGIADNATMVRVDVFEKGDKYYLVPIYSWQVAKGILPDRAVVAYADEEDWTVIDESFRFKFVLYSNDLIKVQLKKDSFLGYFSGLDRATGAISLREHDLEKSKGKDGMHRIGVKTALSFQKYQIDEMGKEIRPCRLKKRPPVR

SEQ ID NO: 213 - DNA, 3240 bp, synthetic construct
  source 1..3240: mol_type = other DNA
gctgcttttaagcctaatcctattaattatattcttggtcttgatattggtattgcttctgttggttgggctatggttgagattgatgaggaggagaatcctattcgtcttattgatcttggtgttcgtgtttttgagcgtgctgaggttcctaagactggtgattctcttgctatggctcgtcgtcttgctcgttctgttcgtcgtcttactcgtcgtcgtgctcatcgtcttcttcgtgctcgtcgtcttcttaagcgtgagggtgttcttcaggctgctgattttgatgagaatggtcttattaagtctcttcctaatactccttggcagcttcgtgctgctgctcttgatcgtaagcttactcctcttgagtggtctgctgttcttcttcatcttattaagcatcgtggttatctttctcagcgtaagaatgagggtgagactgctgataaggagcttggtgctcttcttaagggtgttgctgataatgctcatgctcttcagactggtgattttcgtactcctgctgagcttgctcttaataagtttgagaaggagtgtggtcatattcgtaatcagcgtggtgattattctcatactttttctcgtaaggatcttcaggctgagcttaatcttctttttgagaagcagaaggagtttggtaatcctcatgtttctggtggtcttaaggagggtattgagactcttcttatgactcagcgtcctgctctttctggtgatgctgttcagaagatgcttggtcattgtacttttgagcctgctgagcctaaggctgctaagaatacttatactgctgagcgttttatttggcttactaagcttaataatcttcgtattcttgagcagggttctgagcgtcctcttactgatactgagcgtgctactcttatggatgagccttatcgtaagtctaagcttacttatgctcaggctcgtaagcttctttctcttgaggatactgctttttttaagggtcttcgttatggtaaggataatgctgaggcttctactcttatggagatgaaggcttatcatactatttctcgtgctcttgagaaggagggtcttaaggataagaagtctcctcttaatctttctcctgagcttcaggatgagattggtactgctttttctctttttaagactgatgaggatattactggtcgtcttaaggatcgtattcagcctgagattcttgaggctcttcttaagcatatttcttttgataagtttgttcagatttctcttaaggctcttcgtcgtattgttcctcttatggagcagggtaagcgttatgatgaggcttgtgctgagatttatggtgatcattatggtaagaagaatactgaggagaagatttatcttcctcctattcctgctgatgagattcgtaatcctgttgttcttcgtgctctttctcaggctcgtaaggttattaatggtgttgttcgtcgttatggttctcctgctcgtattcatattgagactgctcgtgaggttggtaagtcttttaaggatcgtaaggagattgagaagcgtcaggaggagaatcgtaaggatcgtgagaaggctgctgctaagtttcgtgagtattttcctaattttgttggtgagcctaagtctaaggatattcttaagcttcgtctttatgagcagcagcatggtaagtgtctttattctggtaaggagattaatcttggtcgtcttaatgagaagggttatgttgagattgatcatgctcttcctttttctcgtacttgggatgattcttttaataataaggttcttgttcttggttctgagaatcagaataagggtaatcagactccttatgagtattttaatggtaaggataattctcgtgagtggcaggagtttaaggctcgtgttgagacttctcgttttcctcgttctaagaagcagcgtattcttcttcagaagtttgatgaggatggttttaaggagcgtaatcttaatgatactcgttatgttaatcgttttctttgtcagtttgttgctgatcgtatgcgtcttactggtaagggtaagaagcgtgtttttgcttctaatggtcagattactaatcttcttcgtggtttttggggtcttcgtaaggttcgtgctgagaatgatcgtcatcatgctcttgatgctgttgttgttgcttgttctactgttgctatgcagcagaagattactcgttttgttcgttataaggagatgaatgcttttgatggtaagactattgataaggagactggtgaggttcttcatcagaagactcattttcctcagccttgggagttttttgctcaggaggttatgattcgtgtttttggtaagcctgatggtaagcctgagtttgaggaggctgatactcctgagaagcttcgtactcttcttgctgagaagctttcttctcgtcctgaggctgttcatgagtatgttactcctctttttgtttctcgtgctcctaatcgtaagatgtctggtcagggtcatatggagactgttaagtctgctaagcgtcttgatgagggtgtttctgttcttcgtgttcctcttactcagcttaagcttaaggatcttgagaagatggttaatcgtgagcgtgagcctaagctttatgaggctcttaaggctcgtcttgaggctcataaggatgatcctgctaaggcttttgctgagcctttttataagtatgataaggctggtaatcgtactcagcaggttaaggctgttcgtgttgagcaggttcagaagactggtgtttgggttcgtaatcataatggtattgctgataatgctactatggttcgtgttgatgtttttgagaagggtgataagtattatcttgttcctatttattcttggcaggttgctaagggtattcttcctgatcgtgctgttgttgcttatgctgatgaggaggattggactgttattgatgagtcttttcgttttaagtttgttctttattctaatgatcttattaaggttcagcttaagaaggattcttttcttggttatttttctggtcttgatcgtgctactggtgctatttctcttcgtgagcatgatcttgagaagtctaagggtaaggatggtatgcatcgtattggtgttaagactgctctttcttttcagaagtatcagattgatgagatgggtaaggagattcgtccttgtcgtcttaagaagcgtcctcctgttcgt

SEQ ID NO: 214 - DNA, 3240 bp, synthetic construct
  source 1..3240: mol_type = other DNA
gccgccttcaagcccaaccccatcaactacatcctgggcctggacatcggcatcgcctccgtgggctgggccatggtggagatcgacgaggaggagaaccccatccggctgatcgacctgggcgtgcgggtgttcgagcgggccgaggtgcccaagaccggcgactccctggccatggcccggcggctggcccggtccgtgcggcggctgacccggcggcgggcccaccggctgctgcgggcccggcggctgctgaagcgggagggcgtgctgcaggccgccgacttcgacgagaacggcctgatcaagtccctgcccaacaccccctggcagctgcgggccgccgccctggaccggaagctgacccccctggagtggtccgccgtgctgctgcacctgatcaagcaccggggctacctgtcccagcggaagaacgagggcgagaccgccgacaaggagctgggcgccctgctgaagggcgtggccgacaacgcccacgccctgcagaccggcgacttccggacccccgccgagctggccctgaacaagttcgagaaggagtgcggccacatccggaaccagcggggcgactactcccacaccttctcccggaaggacctgcaggccgagctgaacctgctgttcgagaagcagaaggagttcggcaacccccacgtgtccggcggcctgaaggagggcatcgagaccctgctgatgacccagcggcccgccctgtccggcgacgccgtgcagaagatgctgggccactgcaccttcgagcccgccgagcccaaggccgccaagaacacctacaccgccgagcggttcatctggctgaccaagctgaacaacctgcggatcctggagcagggctccgagcggcccctgaccgacaccgagcgggccaccctgatggacgagccctaccggaagtccaagctgacctacgcccaggcccggaagctgctgtccctggaggacaccgccttcttcaagggcctgcggtacggcaaggacaacgccgaggcctccaccctgatggagatgaaggcctaccacaccatctcccgggccctggagaaggagggcctgaaggacaagaagtcccccctgaacctgtcccccgagctgcaggacgagatcggcaccgccttctccctgttcaagaccgacgaggacatcaccggccggctgaaggaccggatccagcccgagatcctggaggccctgctgaagcacatctccttcgacaagttcgtgcagatctccctgaaggccctgcggcggatcgtgcccctgatggagcagggcaagcggtacgacgaggcctgcgccgagatctacggcgaccactacggcaagaagaacaccgaggagaagatctacctgccccccatccccgccgacgagatccggaaccccgtggtgctgcgggccctgtcccaggcccggaaggtgatcaacggcgtggtgcggcggtacggctcccccgcccggatccacatcgagaccgcccgggaggtgggcaagtccttcaaggaccggaaggagatcgagaagcggcaggaggagaaccggaaggaccgggagaaggccgccgccaagttccgggagtacttccccaacttcgtgggcgagcccaagtccaaggacatcctgaagctgcggctgtacgagcagcagcacggcaagtgcctgtactccggcaaggagatcaacctgggccggctgaacgagaagggctacgtggagatcgaccacgccctgcccttctcccggacctgggacgactccttcaacaacaaggtgctggtgctgggctccgagaaccagaacaagggcaaccagaccccctacgagtacttcaacggcaaggacaactcccgggagtggcaggagttcaaggcccgggtggagacctcccggttcccccggtccaagaagcagcggatcctgctgcagaagttcgacgaggacggcttcaaggagcggaacctgaacgacacccggtacgtgaaccggttcctgtgccagttcgtggccgaccggatgcggctgaccggcaagggcaagaagcgggtgttcgcctccaacggccagatcaccaacctgctgcggggcttctggggcctgcggaaggtgcgggccgagaacgaccggcaccacgccctggacgccgtggtggtggcctgctccaccgtggccatgcagcagaagatcacccggttcgtgcggtacaaggagatgaacgccttcgacggcaagaccatcgacaaggagaccggcgaggtgctgcaccagaagacccacttcccccagccctgggagttcttcgcccaggaggtgatgatccgggtgttcggcaagcccgacggcaagcccgagttcgaggaggccgacacccccgagaagctgcggaccctgctggccgagaagctgtcctcccggcccgaggccgtgcacgagtacgtgacccccctgttcgtgtcccgggcccccaaccggaagatgtccggccagggccacatggagaccgtgaagtccgccaagcggctggacgagggcgtgtccgtgctgcgggtgcccctgacccagctgaagctgaaggacctggagaagatggtgaaccgggagcgggagcccaagctgtacgaggccctgaaggcccggctggaggcccacaaggacgaccccgccaaggccttcgccgagcccttctacaagtacgacaaggccggcaaccggacccagcaggtgaaggccgtgcgggtggagcaggtgcagaagaccggcgtgtgggtgcggaaccacaacggcatcgccgacaacgccaccatggtgcgggtggacgtgttcgagaagggcgacaagtactacctggtgcccatctactcctggcaggtggccaagggcatcctgcccgaccgggccgtggtggcctacgccgacgaggaggactggaccgtgatcgacgagtccttccggttcaagttcgtgctgtactccaacgacctgatcaaggtgcagctgaagaaggactccttcctgggctacttctccggcctggaccgggccaccggcgccatctccctgcgggagcacgacctggagaagtccaagggcaaggacggcatgcaccggatcggcgtgaagaccgccctgtccttccagaagtaccagatcgacgagatgggcaaggagatccggccctgccggctgaagaagcggccccccgtgcgg

SEQ ID NO: 215 - DNA, 3240 bp, synthetic construct
  source 1..3240: mol_type = other DNA
gcagcattcaaaccaaacccaatcaactacatcctaggactagacatcggaatcgcatcagtaggatgagcaatggtagaaatcgacgaagaagaaaacccaatccgactaatcgacctaggagtacgagtattcgaacgagcagaagtaccaaaaacaggagactcactagcaatggcacgacgactagcacgatcagtacgacgactaacacgacgacgagcacaccgactactacgagcacgacgactactaaaacgagaaggagtactacaagcagcagacttcgacgaaaacggactaatcaaatcactaccaaacacaccatgacaactacgagcagcagcactagaccgaaaactaacaccactagaatgatcagcagtactactacacctaatcaaacaccgaggatacctatcacaacgaaaaaacgaaggagaaacagcagacaaagaactaggagcactactaaaaggagtagcagacaacgcacacgcactacaaacaggagacttccgaacaccagcagaactagcactaaacaaattcgaaaaagaatgcggacacatccgaaaccaacgaggagactactcacacacattctcacgaaaagacctacaagcagaactaaacctactattcgaaaaacaaaaagaattcggaaacccacacgtatcaggaggactaaaagaaggaatcgaaacactactaatgacacaacgaccagcactatcaggagacgcagtacaaaaaatgctaggacactgcacattcgaaccagcagaaccaaaagcagcaaaaaacacatacacagcagaacgattcatctgactaacaaaactaaacaacctacgaatcctagaacaaggatcagaacgaccactaacagacacagaacgagcaacactaatggacgaaccataccgaaaatcaaaactaacatacgcacaagcacgaaaactactatcactagaagacacagcattcttcaaaggactacgatacggaaaagacaacgcagaagcatcaacactaatggaaatgaaagcataccacacaatctcacgagcactagaaaaagaaggactaaaagacaaaaaatcaccactaaacctatcaccagaactacaagacgaaatcggaacagcattctcactattcaaaacagacgaagacatcacaggacgactaaaagaccgaatccaaccagaaatcctagaagcactactaaaacacatctcattcgacaaattcgtacaaatctcactaaaagcactacgacgaatcgtaccactaatggaacaaggaaaacgatacgacgaagcatgcgcagaaatctacggagaccactacggaaaaaaaaacacagaagaaaaaatctacctaccaccaatcccagcagacgaaatccgaaacccagtagtactacgagcactatcacaagcacgaaaagtaatcaacggagtagtacgacgatacggatcaccagcacgaatccacatcgaaacagcacgagaagtaggaaaatcattcaaagaccgaaaagaaatcgaaaaacgacaagaagaaaaccgaaaagaccgagaaaaagcagcagcaaaattccgagaatacttcccaaacttcgtaggagaaccaaaatcaaaagacatcctaaaactacgactatacgaacaacaacacggaaaatgcctatactcaggaaaagaaatcaacctaggacgactaaacgaaaaaggatacgtagaaatcgaccacgcactaccattctcacgaacatgagacgactcattcaacaacaaagtactagtactaggatcagaaaaccaaaacaaaggaaaccaaacaccatacgaatacttcaacggaaaagacaactcacgagaatgacaagaattcaaagcacgagtagaaacatcacgattcccacgatcaaaaaaacaacgaatcctactacaaaaattcgacgaagacggattcaaagaacgaaacctaaacgacacacgatacgtaaaccgattcctatgccaattcgtagcagaccgaatgcgactaacaggaaaaggaaaaaaacgagtattcgcatcaaacggacaaatcacaaacctactacgaggattctgaggactacgaaaagtacgagcagaaaacgaccgacaccacgcactagacgcagtagtagtagcatgctcaacagtagcaatgcaacaaaaaatcacacgattcgtacgatacaaagaaatgaacgcattcgacggaaaaacaatcgacaaagaaacaggagaagtactacaccaaaaaacacacttcccacaaccatgagaattcttcgcacaagaagtaatgatccgagtattcggaaaaccagacggaaaaccagaattcgaagaagcagacacaccagaaaaactacgaacactactagcagaaaaactatcatcacgaccagaagcagtacacgaatacgtaacaccactattcgtatcacgagcaccaaaccgaaaaatgtcaggacaaggacacatggaaacagtaaaatcagcaaaacgactagacgaaggagtatcagtactacgagtaccactaacacaactaaaactaaaagacctagaaaaaatggtaaaccgagaacgagaaccaaaactatacgaagcactaaaagcacgactagaagcacacaaagacgacccagcaaaagcattcgcagaaccattctacaaatacgacaaagcaggaaaccgaacacaacaagtaaaagcagtacgagtagaacaagtacaaaaaacaggagtatgagtacgaaaccacaacggaatcgcagacaacgcaacaatggtacgagtagacgtattcgaaaaaggagacaaatactacctagtaccaatctactcatgacaagtagcaaaaggaatcctaccagaccgagcagtagtagcatacgcagacgaagaagactgaacagtaatcgacgaatcattccgattcaaattcgtactatactcaaacgacctaatcaaagtacaactaaaaaaagactcattcctaggatacttctcaggactagaccgagcaacaggagcaatctcactacgagaacacgacctagaaaaatcaaaaggaaaagacggaatgcaccgaatcggagtaaaaacagcactatcattccaaaaataccaaatcgacgaaatgggaaaagaaatccgaccatgccgactaaaaaaacgaccaccagtacga

SEQ ID NO: 216 - DNA, 3246 bp, synthetic construct
  source 1..3246: mol_type = other DNA
  modified_base 3244: mod_base = OTHER; note = uracil
atggctgcttttaagcctaatcctattaattatattcttggtcttgatattggtattgcttctgttggttgggctatggttgagattgatgaggaggagaatcctattcgtcttattgatcttggtgttcgtgtttttgagcgtgctgaggttcctaagactggtgattctcttgctatggctcgtcgtcttgctcgttctgttcgtcgtcttactcgtcgtcgtgctcatcgtcttcttcgtgctcgtcgtcttcttaagcgtgagggtgttcttcaggctgctgattttgatgagaatggtcttattaagtctcttcctaatactccttggcagcttcgtgctgctgctcttgatcgtaagcttactcctcttgagtggtctgctgttcttcttcatcttattaagcatcgtggttatctttctcagcgtaagaatgagggtgagactgctgataaggagcttggtgctcttcttaagggtgttgctgataatgctcatgctcttcagactggtgattttcgtactcctgctgagcttgctcttaataagtttgagaaggagtgtggtcatattcgtaatcagcgtggtgattattctcatactttttctcgtaaggatcttcaggctgagcttaatcttctttttgagaagcagaaggagtttggtaatcctcatgtttctggtggtcttaaggagggtattgagactcttcttatgactcagcgtcctgctctttctggtgatgctgttcagaagatgcttggtcattgtacttttgagcctgctgagcctaaggctgctaagaatacttatactgctgagcgttttatttggcttactaagcttaataatcttcgtattcttgagcagggttctgagcgtcctcttactgatactgagcgtgctactcttatggatgagccttatcgtaagtctaagcttacttatgctcaggctcgtaagcttctttctcttgaggatactgctttttttaagggtcttcgttatggtaaggataatgctgaggcttctactcttatggagatgaaggcttatcatactatttctcgtgctcttgagaaggagggtcttaaggataagaagtctcctcttaatctttctcctgagcttcaggatgagattggtactgctttttctctttttaagactgatgaggatattactggtcgtcttaaggatcgtattcagcctgagattcttgaggctcttcttaagcatatttcttttgataagtttgttcagatttctcttaaggctcttcgtcgtattgttcctcttatggagcagggtaagcgttatgatgaggcttgtgctgagatttatggtgatcattatggtaagaagaatactgaggagaagatttatcttcctcctattcctgctgatgagattcgtaatcctgttgttcttcgtgctctttctcaggctcgtaaggttattaatggtgttgttcgtcgttatggttctcctgctcgtattcatattgagactgctcgtgaggttggtaagtcttttaaggatcgtaaggagattgagaagcgtcaggaggagaatcgtaaggatcgtgagaaggctgctgctaagtttcgtgagtattttcctaattttgttggtgagcctaagtctaaggatattcttaagcttcgtctttatgagcagcagcatggtaagtgtctttattctggtaaggagattaatcttggtcgtcttaatgagaagggttatgttgagattgatcatgctcttcctttttctcgtacttgggatgattcttttaataataaggttcttgttcttggttctgagaatcagaataagggtaatcagactccttatgagtattttaatggtaaggataattctcgtgagtggcaggagtttaaggctcgtgttgagacttctcgttttcctcgttctaagaagcagcgtattcttcttcagaagtttgatgaggatggttttaaggagcgtaatcttaatgatactcgttatgttaatcgttttctttgtcagtttgttgctgatcgtatgcgtcttactggtaagggtaagaagcgtgtttttgcttctaatggtcagattactaatcttcttcgtggtttttggggtcttcgtaaggttcgtgctgagaatgatcgtcatcatgctcttgatgctgttgttgttgcttgttctactgttgctatgcagcagaagattactcgttttgttcgttataaggagatgaatgcttttgatggtaagactattgataaggagactggtgaggttcttcatcagaagactcattttcctcagccttgggagttttttgctcaggaggttatgattcgtgtttttggtaagcctgatggtaagcctgagtttgaggaggctgatactcctgagaagcttcgtactcttcttgctgagaagctttcttctcgtcctgaggctgttcatgagtatgttactcctctttttgtttctcgtgctcctaatcgtaagatgtctggtcagggtcatatggagactgttaagtctgctaagcgtcttgatgagggtgtttctgttcttcgtgttcctcttactcagcttaagcttaaggatcttgagaagatggttaatcgtgagcgtgagcctaagctttatgaggctcttaaggctcgtcttgaggctcataaggatgatcctgctaaggcttttgctgagcctttttataagtatgataaggctggtaatcgtactcagcaggttaaggctgttcgtgttgagcaggttcagaagactggtgtttgggttcgtaatcataatggtattgctgataatgctactatggttcgtgttgatgtttttgagaagggtgataagtattatcttgttcctatttattcttggcaggttgctaagggtattcttcctgatcgtgctgttgttgcttatgctgatgaggaggattggactgttattgatgagtcttttcgttttaagtttgttctttattctaatgatcttattaaggttcagcttaagaaggattcttttcttggttatttttctggtcttgatcgtgctactggtgctatttctcttcgtgagcatgatcttgagaagtctaagggtaaggatggtatgcatcgtattggtgttaagactgctctttcttttcagaagtatcagattgatgagatgggtaaggagattcgtccttgtcgtcttaagaagcgtcctcctgttcgttga

SEQ ID NO: 217 - DNA, 3246 bp, synthetic construct
  source 1..3246: mol_type = other DNA
  modified_base 3244: mod_base = OTHER; note = uracil
atggccgccttcaagcccaaccccatcaactacatcctgggcctggacatcggcatcgcctccgtgggctgggccatggtggagatcgacgaggaggagaaccccatccggctgatcgacctgggcgtgcgggtgttcgagcgggccgaggtgcccaagaccggcgactccctggccatggcccggcggctggcccggtccgtgcggcggctgacccggcggcgggcccaccggctgctgcgggcccggcggctgctgaagcgggagggcgtgctgcaggccgccgacttcgacgagaacggcctgatcaagtccctgcccaacaccccctggcagctgcgggccgccgccctggaccggaagctgacccccctggagtggtccgccgtgctgctgcacctgatcaagcaccggggctacctgtcccagcggaagaacgagggcgagaccgccgacaaggagctgggcgccctgctgaagggcgtggccgacaacgcccacgccctgcagaccggcgacttccggacccccgccgagctggccctgaacaagttcgagaaggagtgcggccacatccggaaccagcggggcgactactcccacaccttctcccggaaggacctgcaggccgagctgaacctgctgttcgagaagcagaaggagttcggcaacccccacgtgtccggcggcctgaaggagggcatcgagaccctgctgatgacccagcggcccgccctgtccggcgacgccgtgcagaagatgctgggccactgcaccttcgagcccgccgagcccaaggccgccaagaacacctacaccgccgagcggttcatctggctgaccaagctgaacaacctgcggatcctggagcagggctccgagcggcccctgaccgacaccgagcgggccaccctgatggacgagccctaccggaagtccaagctgacctacgcccaggcccggaagctgctgtccctggaggacaccgccttcttcaagggcctgcggtacggcaaggacaacgccgaggcctccaccctgatggagatgaaggcctaccacaccatctcccgggccctggagaaggagggcctgaaggacaagaagtcccccctgaacctgtcccccgagctgcaggacgagatcggcaccgccttctccctgttcaagaccgacgaggacatcaccggccggctgaaggaccggatccagcccgagatcctggaggccctgctgaagcacatctccttcgacaagttcgtgcagatctccctgaaggccctgcggcggatcgtgcccctgatggagcagggcaagcggtacgacgaggcctgcgccgagatctacggcgaccactacggcaagaagaacaccgaggagaagatctacctgccccccatccccgccgacgagatccggaaccccgtggtgctgcgggccctgtcccaggcccggaaggtgatcaacggcgtggtgcggcggtacggctcccccgcccggatccacatcgagaccgcccgggaggtgggcaagtccttcaaggaccggaaggagatcgagaagcggcaggaggagaaccggaaggaccgggagaaggccgccgccaagttccgggagtacttccccaacttcgtgggcgagcccaagtccaaggacatcctgaagctgcggctgtacgagcagcagcacggcaagtgcctgtactccggcaaggagatcaacctgggccggctgaacgagaagggctacgtggagatcgaccacgccctgcccttctcccggacctgggacgactccttcaacaacaaggtgctggtgctgggctccgagaaccagaacaagggcaaccagaccccctacgagtacttcaacggcaaggacaactcccgggagtggcaggagttcaaggcccgggtggagacctcccggttcccccggtccaagaagcagcggatcctgctgcagaagttcgacgaggacggcttcaaggagcggaacctgaacgacacccggtacgtgaaccggttcctgtgccagttcgtggccgaccggatgcggctgaccggcaagggcaagaagcgggtgttcgcctccaacggccagatcaccaacctgctgcggggcttctggggcctgcggaaggtgcgggccgagaacgaccggcaccacgccctggacgccgtggtggtggcctgctccaccgtggccatgcagcagaagatcacccggttcgtgcggtacaaggagatgaacgccttcgacggcaagaccatcgacaaggagaccggcgaggtgctgcaccagaagacccacttcccccagccctgggagttcttcgcccaggaggtgatgatccgggtgttcggcaagcccgacggcaagcccgagttcgaggaggccgacacccccgagaagctgcggaccctgctggccgagaagctgtcctcccggcccgaggccgtgcacgagtacgtgacccccctgttcgtgtcccgggcccccaaccggaagatgtccggccagggccacatggagaccgtgaagtccgccaagcggctggacgagggcgtgtccgtgctgcgggtgcccctgacccagctgaagctgaaggacctggagaagatggtgaaccgggagcgggagcccaagctgtacgaggccctgaaggcccggctggaggcccacaaggacgaccccgccaaggccttcgccgagcccttctacaagtacgacaaggccggcaaccggacccagcaggtgaaggccgtgcgggtggagcaggtgcagaagaccggcgtgtgggtgcggaaccacaacggcatcgccgacaacgccaccatggtgcgggtggacgtgttcgagaagggcgacaagtactacctggtgcccatctactcctggcaggtggccaagggcatcctgcccgaccgggccgtggtggcctacgccgacgaggaggactggaccgtgatcgacgagtccttccggttcaagttcgtgctgtactccaacgacctgatcaaggtgcagctgaagaaggactccttcctgggctacttctccggcctggaccgggccaccggcgccatctccctgcgggagcacgacctggagaagtccaagggcaaggacggcatgcaccggatcggcgtgaagaccgccctgtccttccagaagtaccagatcgacgagatgggcaaggagatccggccctgccggctgaagaagcggccccccgtgcggtga

SEQ ID NO: 218 - DNA, 3246 bp, synthetic construct
  source 1..3246: mol_type = other DNA
  modified_base 3244: mod_base = OTHER; note = uracil
atggcagcattcaaaccaaacccaatcaactacatcctaggactagacatcggaatcgcatcagtaggatgagcaatggtagaaatcgacgaagaagaaaacccaatccgactaatcgacctaggagtacgagtattcgaacgagcagaagtaccaaaaacaggagactcactagcaatggcacgacgactagcacgatcagtacgacgactaacacgacgacgagcacaccgactactacgagcacgacgactactaaaacgagaaggagtactacaagcagcagacttcgacgaaaacggactaatcaaatcactaccaaacacaccatgacaactacgagcagcagcactagaccgaaaactaacaccactagaatgatcagcagtactactacacctaatcaaacaccgaggatacctatcacaacgaaaaaacgaaggagaaacagcagacaaagaactaggagcactactaaaaggagtagcagacaacgcacacgcactacaaacaggagacttccgaacaccagcagaactagcactaaacaaattcgaaaaagaatgcggacacatccgaaaccaacgaggagactactcacacacattctcacgaaaagacctacaagcagaactaaacctactattcgaaaaacaaaaagaattcggaaacccacacgtatcaggaggactaaaagaaggaatcgaaacactactaatgacacaacgaccagcactatcaggagacgcagtacaaaaaatgctaggacactgcacattcgaaccagcagaaccaaaagcagcaaaaaacacatacacagcagaacgattcatctgactaacaaaactaaacaacctacgaatcctagaacaaggatcagaacgaccactaacagacacagaacgagcaacactaatggacgaaccataccgaaaatcaaaactaacatacgcacaagcacgaaaactactatcactagaagacacagcattcttcaaaggactacgatacggaaaagacaacgcagaagcatcaacactaatggaaatgaaagcataccacacaatctcacgagcactagaaaaagaaggactaaaagacaaaaaatcaccactaaacctatcaccagaactacaagacgaaatcggaacagcattctcactattcaaaacagacgaagacatcacaggacgactaaaagaccgaatccaaccagaaatcctagaagcactactaaaacacatctcattcgacaaattcgtacaaatctcactaaaagcactacgacgaatcgtaccactaatggaacaaggaaaacgatacgacgaagcatgcgcagaaatctacggagaccactacggaaaaaaaaacacagaagaaaaaatctacctaccaccaatcccagcagacgaaatccgaaacccagtagtactacgagcactatcacaagcacgaaaagtaatcaacggagtagtacgacgatacggatcaccagcacgaatccacatcgaaacagcacgagaagtaggaaaatcattcaaagaccgaaaagaaatcgaaaaacgacaagaagaaaaccgaaaagaccgagaaaaagcagcagcaaaattccgagaatacttcccaaacttcgtaggagaaccaaaatcaaaagacatcctaaaactacgactatacgaacaacaacacggaaaatgcctatactcaggaaaagaaatcaacctaggacgactaaacgaaaaaggatacgtagaaatcgaccacgcactaccattctcacgaacatgagacgactcattcaacaacaaagtactagtactaggatcagaaaaccaaaacaaaggaaaccaaacaccatacgaatacttcaacggaaaagacaactcacgagaatgacaagaattcaaagcacgagtagaaacatcacgattcccacgatcaaaaaaacaacgaatcctactacaaaaattcgacgaagacggattcaaagaacgaaacctaaacgacacacgatacgtaaaccgattcctatgccaattcgtagcagaccgaatgcgactaacaggaaaaggaaaaaaacgagtattcgcatcaaacggacaaatcacaaacctactacgaggattctgaggactacgaaaagtacgagcagaaaacgaccgacaccacgcactagacgcagtagtagtagcatgctcaacagtagcaatgcaacaaaaaatcacacgattcgtacgatacaaagaaatgaacgcattcgacggaaaaacaatcgacaaagaaacaggagaagtactacaccaaaaaacacacttcccacaaccatgagaattcttcgcacaagaagtaatgatccgagtattcggaaaaccagacggaaaaccagaattcgaagaagcagacacaccagaaaaactacgaacactactagcagaaaaactatcatcacgaccagaagcagtacacgaatacgtaacaccactattcgtatcacgagcaccaaaccgaaaaatgtcaggacaaggacacatggaaacagtaaaatcagcaaaacgactagacgaaggagtatcagtactacgagtaccactaacacaactaaaactaaaagacctagaaaaaatggtaaaccgagaacgagaaccaaaactatacgaagcactaaaagcacgactagaagcacacaaagacgacccagcaaaagcattcgcagaaccattctacaaatacgacaaagcaggaaaccgaacacaacaagtaaaagcagtacgagtagaacaagtacaaaaaacaggagtatgagtacgaaaccacaacggaatcgcagacaacgcaacaatggtacgagtagacgtattcgaaaaaggagacaaatactacctagtaccaatctactcatgacaagtagcaaaaggaatcctaccagaccgagcagtagtagcatacgcagacgaagaagactgaacagtaatcgacgaatcattccgattcaaattcgtactatactcaaacgacctaatcaaagtacaactaaaaaaagactcattcctaggatacttctcaggactagaccgagcaacaggagcaatctcactacgagaacacgacctagaaaaatcaaaaggaaaagacggaatgcaccgaatcggagtaaaaacagcactatcattccaaaaataccaaatcgacgaaatgggaaaagaaatccgaccatgccgactaaaaaaacgaccaccagtacgataa

SEQ ID NO: 219 - protein, 1081 aa, synthetic construct
MAAFKPNPINYILGLDIGIASVGWAMVEIDEEENPIRLIDLGVRVFERAEVPKTGDSLAMARRLARSVRRLTRRRAHRLLRARRLLKREGVLQAADFDENGLIKSLPNTPWQLRAAALDRKLTPLEWSAVLLHLIKHRGYLSQRKNEGETADKELGALLKGVADNAHALQTGDFRTPAELALNKFEKECGHIRNQRGDYSHTFSRKDLQAELNLLFEKQKEFGNPHVSGGLKEGIETLLMTQRPALSGDAVQKMLGHCTFEPAEPKAAKNTYTAERFIWLTKLNNLRILEQGSERPLTDTERATLMDEPYRKSKLTYAQARKLLSLEDTAFFKGLRYGKDNAEASTLMEMKAYHTISRALEKEGLKDKKSPLNLSPELQDEIGTAFSLFKTDEDITGRLKDRIQPEILEALLKHISFDKFVQISLKALRRIVPLMEQGKRYDEACAEIYGDHYGKKNTEEKIYLPPIPADEIRNPVVLRALSQARKVINGVVRRYGSPARIHIETAREVGKSFKDRKEIEKRQEENRKDREKAAAKFREYFPNFVGEPKSKDILKLRLYEQQHGKCLYSGKEINLGRLNEKGYVEIDAALPFSRTWDDSFNNKVLVLGSENQNKGNQTPYEYFNGKDNSREWQEFKARVETSRFPRSKKQRILLQKFDEDGFKERNLNDTRYVNRFLCQFVADRMRLTGKGKKRVFASNGQITNLLRGFWGLRKVRAENDRHHALDAVVVACSTVAMQQKITRFVRYKEMNAFDGKTIDKETGEVLHQKTHFPQPWEFFAQEVMIRVFGKPDGKPEFEEADTPEKLRTLLAEKLSSRPEAVHEYVTPLFVSRAPNRKMSGQGHMETVKSAKRLDEGVSVLRVPLTQLKLKDLEKMVNREREPKLYEALKARLEAHKDDPAKAFAEPFYKYDKAGNRTQQVKAVRVEQVQKTGVWVRNHNGIADNATMVRVDVFEKGDKYYLVPIYSWQVAKGILPDRAVVAYADEEDWTVIDESFRFKFVLYSNDLIKVQLKKDSFLGYFSGLDRATGAISLREHDLEKSKGKDGMHRIGVKTALSFQKYQIDEMGKEIRPCRLKKRPPVR

SEQ ID NO: 220 - DNA, 3240 bp, synthetic construct
  source 1..3240: mol_type = other DNA
gctgcttttaagcctaatcctattaattatattcttggtcttgatattggtattgcttctgttggttgggctatggttgagattgatgaggaggagaatcctattcgtcttattgatcttggtgttcgtgtttttgagcgtgctgaggttcctaagactggtgattctcttgctatggctcgtcgtcttgctcgttctgttcgtcgtcttactcgtcgtcgtgctcatcgtcttcttcgtgctcgtcgtcttcttaagcgtgagggtgttcttcaggctgctgattttgatgagaatggtcttattaagtctcttcctaatactccttggcagcttcgtgctgctgctcttgatcgtaagcttactcctcttgagtggtctgctgttcttcttcatcttattaagcatcgtggttatctttctcagcgtaagaatgagggtgagactgctgataaggagcttggtgctcttcttaagggtgttgctgataatgctcatgctcttcagactggtgattttcgtactcctgctgagcttgctcttaataagtttgagaaggagtgtggtcatattcgtaatcagcgtggtgattattctcatactttttctcgtaaggatcttcaggctgagcttaatcttctttttgagaagcagaaggagtttggtaatcctcatgtttctggtggtcttaaggagggtattgagactcttcttatgactcagcgtcctgctctttctggtgatgctgttcagaagatgcttggtcattgtacttttgagcctgctgagcctaaggctgctaagaatacttatactgctgagcgttttatttggcttactaagcttaataatcttcgtattcttgagcagggttctgagcgtcctcttactgatactgagcgtgctactcttatggatgagccttatcgtaagtctaagcttacttatgctcaggctcgtaagcttctttctcttgaggatactgctttttttaagggtcttcgttatggtaaggataatgctgaggcttctactcttatggagatgaaggcttatcatactatttctcgtgctcttgagaaggagggtcttaaggataagaagtctcctcttaatctttctcctgagcttcaggatgagattggtactgctttttctctttttaagactgatgaggatattactggtcgtcttaaggatcgtattcagcctgagattcttgaggctcttcttaagcatatttcttttgataagtttgttcagatttctcttaaggctcttcgtcgtattgttcctcttatggagcagggtaagcgttatgatgaggcttgtgctgagatttatggtgatcattatggtaagaagaatactgaggagaagatttatcttcctcctattcctgctgatgagattcgtaatcctgttgttcttcgtgctctttctcaggctcgtaaggttattaatggtgttgttcgtcgttatggttctcctgctcgtattcatattgagactgctcgtgaggttggtaagtcttttaaggatcgtaaggagattgagaagcgtcaggaggagaatcgtaaggatcgtgagaaggctgctgctaagtttcgtgagtattttcctaattttgttggtgagcctaagtctaaggatattcttaagcttcgtctttatgagcagcagcatggtaagtgtctttattctggtaaggagattaatcttggtcgtcttaatgagaagggttatgttgagattgatgctgctcttcctttttctcgtacttgggatgattcttttaataataaggttcttgttcttggttctgagaatcagaataagggtaatcagactccttatgagtattttaatggtaaggataattctcgtgagtggcaggagtttaaggctcgtgttgagacttctcgttttcctcgttctaagaagcagcgtattcttcttcagaagtttgatgaggatggttttaaggagcgtaatcttaatgatactcgttatgttaatcgttttctttgtcagtttgttgctgatcgtatgcgtcttactggtaagggtaagaagcgtgtttttgcttctaatggtcagattactaatcttcttcgtggtttttggggtcttcgtaaggttcgtgctgagaatgatcgtcatcatgctcttgatgctgttgttgttgcttgttctactgttgctatgcagcagaagattactcgttttgttcgttataaggagatgaatgcttttgatggtaagactattgataaggagactggtgaggttcttcatcagaagactcattttcctcagccttgggagttttttgctcaggaggttatgattcgtgtttttggtaagcctgatggtaagcctgagtttgaggaggctgatactcctgagaagcttcgtactcttcttgctgagaagctttcttctcgtcctgaggctgttcatgagtatgttactcctctttttgtttctcgtgctcctaatcgtaagatgtctggtcagggtcatatggagactgttaagtctgctaagcgtcttgatgagggtgtttctgttcttcgtgttcctcttactcagcttaagcttaaggatcttgagaagatggttaatcgtgagcgtgagcctaagctttatgaggctcttaaggctcgtcttgaggctcataaggatgatcctgctaaggcttttgctgagcctttttataagtatgataaggctggtaatcgtactcagcaggttaaggctgttcgtgttgagcaggttcagaagactggtgtttgggttcgtaatcataatggtattgctgataatgctactatggttcgtgttgatgtttttgagaagggtgataagtattatcttgttcctatttattcttggcaggttgctaagggtattcttcctgatcgtgctgttgttgcttatgctgatgaggaggattggactgttattgatgagtcttttcgttttaagtttgttctttattctaatgatcttattaaggttcagcttaagaaggattcttttcttggttatttttctggtcttgatcgtgctactggtgctatttctcttcgtgagcatgatcttgagaagtctaagggtaaggatggtatgcatcgtattggtgttaagactgctctttcttttcagaagtatcagattgatgagatgggtaaggagattcgtccttgtcgtcttaagaagcgtcctcctgttcgt

SEQ ID NO: 221 - DNA, 3240 bp, synthetic construct
  source 1..3240: mol_type = other DNA
gccgccttcaagcccaaccccatcaactacatcctgggcctggacatcggcatcgcctccgtgggctgggccatggtggagatcgacgaggaggagaaccccatccggctgatcgacctgggcgtgcgggtgttcgagcgggccgaggtgcccaagaccggcgactccctggccatggcccggcggctggcccggtccgtgcggcggctgacccggcggcgggcccaccggctgctgcgggcccggcggctgctgaagcgggagggcgtgctgcaggccgccgacttcgacgagaacggcctgatcaagtccctgcccaacaccccctggcagctgcgggccgccgccctggaccggaagctgacccccctggagtggtccgccgtgctgctgcacctgatcaagcaccggggctacctgtcccagcggaagaacgagggcgagaccgccgacaaggagctgggcgccctgctgaagggcgtggccgacaacgcccacgccctgcagaccggcgacttccggacccccgccgagctggccctgaacaagttcgagaaggagtgcggccacatccggaaccagcggggcgactactcccacaccttctcccggaaggacctgcaggccgagctgaacctgctgttcgagaagcagaaggagttcggcaacccccacgtgtccggcggcctgaaggagggcatcgagaccctgctgatgacccagcggcccgccctgtccggcgacgccgtgcagaagatgctgggccactgcaccttcgagcccgccgagcccaaggccgccaagaacacctacaccgccgagcggttcatctggctgaccaagctgaacaacctgcggatcctggagcagggctccgagcggcccctgaccgacaccgagcgggccaccctgatggacgagccctaccggaagtccaagctgacctacgcccaggcccggaagctgctgtccctggaggacaccgccttcttcaagggcctgcggtacggcaaggacaacgccgaggcctccaccctgatggagatgaaggcctaccacaccatctcccgggccctggagaaggagggcctgaaggacaagaagtcccccctgaacctgtcccccgagctgcaggacgagatcggcaccgccttctccctgttcaagaccgacgaggacatcaccggccggctgaaggaccggatccagcccgagatcctggaggccctgctgaagcacatctccttcgacaagttcgtgcagatctccctgaaggccctgcggcggatcgtgcccctgatggagcagggcaagcggtacgacgaggcctgcgccgagatctacggcgaccactacggcaagaagaacaccgaggagaagatctacctgccccccatccccgccgacgagatccggaaccccgtggtgctgcgggccctgtcccaggcccggaaggtgatcaacggcgtggtgcggcggtacggctcccccgcccggatccacatcgagaccgcccgggaggtgggcaagtccttcaaggaccggaaggagatcgagaagcggcaggaggagaaccggaaggaccgggagaaggccgccgccaagttccgggagtacttccccaacttcgtgggcgagcccaagtccaaggacatcctgaagctgcggctgtacgagcagcagcacggcaagtgcctgtactccggcaaggagatcaacctgggccggctgaacgagaagggctacgtggagatcgacgccgccctgcccttctcccggacctgggacgactccttcaacaacaaggtgctggtgctgggctccgagaaccagaacaagggcaaccagaccccctacgagtacttcaacggcaaggacaactcccgggagtggcaggagttcaaggcccgggtggagacctcccggttcccccggtccaagaagcagcggatcctgctgcagaagttcgacgaggacggcttcaaggagcggaacctgaacgacacccggtacgtgaaccggttcctgtgccagttcgtggccgaccggatgcggctgaccggcaagggcaagaagcgggtgttcgcctccaacggccagatcaccaacctgctgcggggcttctggggcctgcggaaggtgcgggccgagaacgaccggcaccacgccctggacgccgtggtggtggcctgctccaccgtggccatgcagcagaagatcacccggttcgtgcggtacaaggagatgaacgccttcgacggcaagaccatcgacaaggagaccggcgaggtgctgcaccagaagacccacttcccccagccctgggagttcttcgcccaggaggtgatgatccgggtgttcggcaagcccgacggcaagcccgagttcgaggaggccgacacccccgagaagctgcggaccctgctggccgagaagctgtcctcccggcccgaggccgtgcacgagtacgtgacccccctgttcgtgtcccgggcccccaaccggaagatgtccggccagggccacatggagaccgtgaagtccgccaagcggctggacgagggcgtgtccgtgctgcgggtgcccctgacccagctgaagctgaaggacctggagaagatggtgaaccgggagcgggagcccaagctgtacgaggccctgaaggcccggctggaggcccacaaggacgaccccgccaaggccttcgccgagcccttctacaagtacgacaaggccggcaaccggacccagcaggtgaaggccgtgcgggtggagcaggtgcagaagaccggcgtgtgggtgcggaaccacaacggcatcgccgacaacgccaccatggtgcgggtggacgtgttcgagaagggcgacaagtactacctggtgcccatctactcctggcaggtggccaagggcatcctgcccgaccgggccgtggtggcctacgccgacgaggaggactggaccgtgatcgacgagtccttccggttcaagttcgtgctgtactccaacgacctgatcaaggtgcagctgaagaaggactccttcctgggctacttctccggcctggaccgggccaccggcgccatctccctgcgggagcacgacctggagaagtccaagggcaaggacggcatgcaccggatcggcgtgaagaccgccctgtccttccagaagtaccagatcgacgagatgggcaaggagatccggccctgccggctgaagaagcggccccccgtgcgg

SEQ ID NO: 222 - DNA, 3240 bp, synthetic construct
  source 1..3240: mol_type = other DNA
gcagcattcaaaccaaacccaatcaactacatcctaggactagacatcggaatcgcatcagtaggatgagcaatggtagaaatcgacgaagaagaaaacccaatccgactaatcgacctaggagtacgagtattcgaacgagcagaagtaccaaaaacaggagactcactagcaatggcacgacgactagcacgatcagtacgacgactaacacgacgacgagcacaccgactactacgagcacgacgactactaaaacgagaaggagtactacaagcagcagacttcgacgaaaacggactaatcaaatcactaccaaacacaccatgacaactacgagcagcagcactagaccgaaaactaacaccactagaatgatcagcagtactactacacctaatcaaacaccgaggatacctatcacaacgaaaaaacgaaggagaaacagcagacaaagaactaggagcactactaaaaggagtagcagacaacgcacacgcactacaaacaggagacttccgaacaccagcagaactagcactaaacaaattcgaaaaagaatgcggacacatccgaaaccaacgaggagactactcacacacattctcacgaaaagacctacaagcagaactaaacctactattcgaaaaacaaaaagaattcggaaacccacacgtatcaggaggactaaaagaaggaatcgaaacactactaatgacacaacgaccagcactatcaggagacgcagtacaaaaaatgctaggacactgcacattcgaaccagcagaaccaaaagcagcaaaaaacacatacacagcagaacgattcatctgactaacaaaactaaacaacctacgaatcctagaacaaggatcagaacgaccactaacagacacagaacgagcaacactaatggacgaaccataccgaaaatcaaaactaacatacgcacaagcacgaaaactactatcactagaagacacagcattcttcaaaggactacgatacggaaaagacaacgcagaagcatcaacactaatggaaatgaaagcataccacacaatctcacgagcactagaaaaagaaggactaaaagacaaaaaatcaccactaaacctatcaccagaactacaagacgaaatcggaacagcattctcactattcaaaacagacgaagacatcacaggacgactaaaagaccgaatccaaccagaaatcctagaagcactactaaaacacatctcattcgacaaattcgtacaaatctcactaaaagcactacgacgaatcgtaccactaatggaacaaggaaaacgatacgacgaagcatgcgcagaaatctacggagaccactacggaaaaaaaaacacagaagaaaaaatctacctaccaccaatcccagcagacgaaatccgaaacccagtagtactacgagcactatcacaagcacgaaaagtaatcaacggagtagtacgacgatacggatcaccagcacgaatccacatcgaaacagcacgagaagtaggaaaatcattcaaagaccgaaaagaaatcgaaaaacgacaagaagaaaaccgaaaagaccgagaaaaagcagcagcaaaattccgagaatacttcccaaacttcgtaggagaaccaaaatcaaaagacatcctaaaactacgactatacgaacaacaacacggaaaatgcctatactcaggaaaagaaatcaacctaggacgactaaacgaaaaaggatacgtagaaatcgacgcagcactaccattctcacgaacatgagacgactcattcaacaacaaagtactagtactaggatcagaaaaccaaaacaaaggaaaccaaacaccatacgaatacttcaacggaaaagacaactcacgagaatgacaagaattcaaagcacgagtagaaacatcacgattcccacgatcaaaaaaacaacgaatcctactacaaaaattcgacgaagacggattcaaagaacgaaacctaaacgacacacgatacgtaaaccgattcctatgccaattcgtagcagaccgaatgcgactaacaggaaaaggaaaaaaacgagtattcgcatcaaacggacaaatcacaaacctactacgaggattctgaggactacgaaaagtacgagcagaaaacgaccgacaccacgcactagacgcagtagtagtagcatgctcaacagtagcaatgcaacaaaaaatcacacgattcgtacgatacaaagaaatgaacgcattcgacggaaaaacaatcgacaaagaaacaggagaagtactacaccaaaaaacacacttcccacaaccatgagaattcttcgcacaagaagtaatgatccgagtattcggaaaaccagacggaaaaccagaattcgaagaagcagacacaccagaaaaactacgaacactactagcagaaaaactatcatcacgaccagaagcagtacacgaatacgtaacaccactattcgtatcacgagcaccaaaccgaaaaatgtcaggacaaggacacatggaaacagtaaaatcagcaaaacgactagacgaaggagtatcagtactacgagtaccactaacacaactaaaactaaaagacctagaaaaaatggtaaaccgagaacgagaaccaaaactatacgaagcactaaaagcacgactagaagcacacaaagacgacccagcaaaagcattcgcagaaccattctacaaatacgacaaagcaggaaaccgaacacaacaagtaaaagcagtacgagtagaacaagtacaaaaaacaggagtatgagtacgaaaccacaacggaatcgcagacaacgcaacaatggtacgagtagacgtattcgaaaaaggagacaaatactacctagtaccaatctactcatgacaagtagcaaaaggaatcctaccagaccgagcagtagtagcatacgcagacgaagaagactgaacagtaatcgacgaatcattccgattcaaattcgtactatactcaaacgacctaatcaaagtacaactaaaaaaagactcattcctaggatacttctcaggactagaccgagcaacaggagcaatctcactacgagaacacgacctagaaaaatcaaaaggaaaagacggaatgcaccgaatcggagtaaaaacagcactatcattccaaaaataccaaatcgacgaaatgggaaaagaaatccgaccatgccgactaaaaaaacgaccaccagtacga

SEQ ID NO: 223 - DNA, 3246 bp, synthetic construct
  source 1..3246: mol_type = other DNA
  modified_base 3244: mod_base = OTHER; note = uracil
atggctgcttttaagcctaatcctattaattatattcttggtcttgatattggtattgcttctgttggttgggctatggttgagattgatgaggaggagaatcctattcgtcttattgatcttggtgttcgtgtttttgagcgtgctgaggttcctaagactggtgattctcttgctatggctcgtcgtcttgctcgttctgttcgtcgtcttactcgtcgtcgtgctcatcgtcttcttcgtgctcgtcgtcttcttaagcgtgagggtgttcttcaggctgctgattttgatgagaatggtcttattaagtctcttcctaatactccttggcagcttcgtgctgctgctcttgatcgtaagcttactcctcttgagtggtctgctgttcttcttcatcttattaagcatcgtggttatctttctcagcgtaagaatgagggtgagactgctgataaggagcttggtgctcttcttaagggtgttgctgataatgctcatgctcttcagactggtgattttcgtactcctgctgagcttgctcttaataagtttgagaaggagtgtggtcatattcgtaatcagcgtggtgattattctcatactttttctcgtaaggatcttcaggctgagcttaatcttctttttgagaagcagaaggagtttggtaatcctcatgtttctggtggtcttaaggagggtattgagactcttcttatgactcagcgtcctgctctttctggtgatgctgttcagaagatgcttggtcattgtacttttgagcctgctgagcctaaggctgctaagaatacttatactgctgagcgttttatttggcttactaagcttaataatcttcgtattcttgagcagggttctgagcgtcctcttactgatactgagcgtgctactcttatggatgagccttatcgtaagtctaagcttacttatgctcaggctcgtaagcttctttctcttgaggatactgctttttttaagggtcttcgttatggtaaggataatgctgaggcttctactcttatggagatgaaggcttatcatactatttctcgtgctcttgagaaggagggtcttaaggataagaagtctcctcttaatctttctcctgagcttcaggatgagattggtactgctttttctctttttaagactgatgaggatattactggtcgtcttaaggatcgtattcagcctgagattcttgaggctcttcttaagcatatttcttttgataagtttgttcagatttctcttaaggctcttcgtcgtattgttcctcttatggagcagggtaagcgttatgatgaggcttgtgctgagatttatggtgatcattatggtaagaagaatactgaggagaagatttatcttcctcctattcctgctgatgagattcgtaatcctgttgttcttcgtgctctttctcaggctcgtaaggttattaatggtgttgttcgtcgttatggttctcctgctcgtattcatattgagactgctcgtgaggttggtaagtcttttaaggatcgtaaggagattgagaagcgtcaggaggagaatcgtaaggatcgtgagaaggctgctgctaagtttcgtgagtattttcctaattttgttggtgagcctaagtctaaggatattcttaagcttcgtctttatgagcagcagcatggtaagtgtctttattctggtaaggagattaatcttggtcgtcttaatgagaagggttatgttgagattgatgctgctcttcctttttctcgtacttgggatgattcttttaataataaggttcttgttcttggttctgagaatcagaataagggtaatcagactccttatgagtattttaatggtaaggataattctcgtgagtggcaggagtttaaggctcgtgttgagacttctcgttttcctcgttctaagaagcagcgtattcttcttcagaagtttgatgaggatggttttaaggagcgtaatcttaatgatactcgttatgttaatcgttttctttgtcagtttgttgctgatcgtatgcgtcttactggtaagggtaagaagcgtgtttttgcttctaatggtcagattactaatcttcttcgtggtttttggggtcttcgtaaggttcgtgctgagaatgatcgtcatcatgctcttgatgctgttgttgttgcttgttctactgttgctatgcagcagaagattactcgttttgttcgttataaggagatgaatgcttttgatggtaagactattgataaggagactggtgaggttcttcatcagaagactcattttcctcagccttgggagttttttgctcaggaggttatgattcgtgtttttggtaagcctgatggtaagcctgagtttgaggaggctgatactcctgagaagcttcgtactcttcttgctgagaagctttcttctcgtcctgaggctgttcatgagtatgttactcctctttttgtttctcgtgctcctaatcgtaagatgtctggtcagggtcatatggagactgttaagtctgctaagcgtcttgatgagggtgtttctgttcttcgtgttcctcttactcagcttaagcttaaggatcttgagaagatggttaatcgtgagcgtgagcctaagctttatgaggctcttaaggctcgtcttgaggctcataaggatgatcctgctaaggcttttgctgagcctttttataagtatgataaggctggtaatcgtactcagcaggttaaggctgttcgtgttgagcaggttcagaagactggtgtttgggttcgtaatcataatggtattgctgataatgctactatggttcgtgttgatgtttttgagaagggtgataagtattatcttgttcctatttattcttggcaggttgctaagggtattcttcctgatcgtgctgttgttgcttatgctgatgaggaggattggactgttattgatgagtcttttcgttttaagtttgttctttattctaatgatcttattaaggttcagcttaagaaggattcttttcttggttatttttctggtcttgatcgtgctactggtgctatttctcttcgtgagcatgatcttgagaagtctaagggtaaggatggtatgcatcgtattggtgttaagactgctctttcttttcagaagtatcagattgatgagatgggtaaggagattcgtccttgtcgtcttaagaagcgtcctcctgttcgttga

SEQ ID NO: 224 - DNA, 3246 bp, synthetic construct
  source 1..3246: mol_type = other DNA
  modified_base 3244: mod_base = OTHER; note = uracil
atggccgccttcaagcccaaccccatcaactacatcctgggcctggacatcggcatcgcctccgtgggctgggccatggtggagatcgacgaggaggagaaccccatccggctgatcgacctgggcgtgcgggtgttcgagcgggccgaggtgcccaagaccggcgactccctggccatggcccggcggctggcccggtccgtgcggcggctgacccggcggcgggcccaccggctgctgcgggcccggcggctgctgaagcgggagggcgtgctgcaggccgccgacttcgacgagaacggcctgatcaagtccctgcccaacaccccctggcagctgcgggccgccgccctggaccggaagctgacccccctggagtggtccgccgtgctgctgcacctgatcaagcaccggggctacctgtcccagcggaagaacgagggcgagaccgccgacaaggagctgggcgccctgctgaagggcgtggccgacaacgcccacgccctgcagaccggcgacttccggacccccgccgagctggccctgaacaagttcgagaaggagtgcggccacatccggaaccagcggggcgactactcccacaccttctcccggaaggacctgcaggccgagctgaacctgctgttcgagaagcagaaggagttcggcaacccccacgtgtccggcggcctgaaggagggcatcgagaccctgctgatgacccagcggcccgccctgtccggcgacgccgtgcagaagatgctgggccactgcaccttcgagcccgccgagcccaaggccgccaagaacacctacaccgccgagcggttcatctggctgaccaagctgaacaacctgcggatcctggagcagggctccgagcggcccctgaccgacaccgagcgggccaccctgatggacgagccctaccggaagtccaagctgacctacgcccaggcccggaagctgctgtccctggaggacaccgccttcttcaagggcctgcggtacggcaaggacaacgccgaggcctccaccctgatggagatgaaggcctaccacaccatctcccgggccctggagaaggagggcctgaaggacaagaagtcccccctgaacctgtcccccgagctgcaggacgagatcggcaccgccttctccctgttcaagaccgacgaggacatcaccggccggctgaaggaccggatccagcccgagatcctggaggccctgctgaagcacatctccttcgacaagttcgtgcagatctccctgaaggccctgcggcggatcgtgcccctgatggagcagggcaagcggtacgacgaggcctgcgccgagatctacggcgaccactacggcaagaagaacaccgaggagaagatctacctgccccccatccccgccgacgagatccggaaccccgtggtgctgcgggccctgtcccaggcccggaaggtgatcaacggcgtggtgcggcggtacggctcccccgcccggatccacatcgagaccgcccgggaggtgggcaagtccttcaaggaccggaaggagatcgagaagcggcaggaggagaaccggaaggaccgggagaaggccgccgccaagttccgggagtacttccccaacttcgtgggcgagcccaagtccaaggacatcctgaagctgcggctgtacgagcagcagcacggcaagtgcctgtactccggcaaggagatcaacctgggccggctgaacgagaagggctacgtggagatcgacgccgccctgcccttctcccggacctgggacgactccttcaacaacaaggtgctggtgctgggctccgagaaccagaacaagggcaaccagaccccctacgagtacttcaacggcaaggacaactcccgggagtggcaggagttcaaggcccgggtggagacctcccggttcccccggtccaagaagcagcggatcctgctgcagaagttcgacgaggacggcttcaaggagcggaacctgaacgacacccggtacgtgaaccggttcctgtgccagttcgtggccgaccggatgcggctgaccggcaagggcaagaagcgggtgttcgcctccaacggccagatcaccaacctgctgcggggcttctggggcctgcggaaggtgcgggccgagaacgaccggcaccacgccctggacgccgtggtggtggcctgctccaccgtggccatgcagcagaagatcacccggttcgtgcggtacaaggagatgaacgccttcgacggcaagaccatcgacaaggagaccggcgaggtgctgcaccagaagacccacttcccccagccctgggagttcttcgcccaggaggtgatgatccgggtgttcggcaagcccgacggcaagcccgagttcgaggaggccgacacccccgagaagctgcggaccctgctggccgagaagctgtcctcccggcccgaggccgtgcacgagtacgtgacccccctgttcgtgtcccgggcccccaaccggaagatgtccggccagggccacatggagaccgtgaagtccgccaagcggctggacgagggcgtgtccgtgctgcgggtgcccctgacccagctgaagctgaaggacctggagaagatggtgaaccgggagcgggagcccaagctgtacgaggccctgaaggcccggctggaggcccacaaggacgaccccgccaaggccttcgccgagcccttctacaagtacgacaaggccggcaaccggacccagcaggtgaaggccgtgcgggtggagcaggtgcagaagaccggcgtgtgggtgcggaaccacaacggcatcgccgacaacgccaccatggtgcgggtggacgtgttcgagaagggcgacaagtactacctggtgcccatctactcctggcaggtggccaagggcatcctgcccgaccgggccgtggtggcctacgccgacgaggaggactggaccgtgatcgacgagtccttccggttcaagttcgtgctgtactccaacgacctgatcaaggtgcagctgaagaaggactccttcctgggctacttctccggcctggaccgggccaccggcgccatctccctgcgggagcacgacctggagaagtccaagggcaaggacggcatgcaccggatcggcgtgaagaccgccctgtccttccagaagtaccagatcgacgagatgggcaaggagatccggccctgccggctgaagaagcggccccccgtgcggtga

SEQ ID NO: 225 - DNA, 3246 bp, synthetic construct
  source 1..3246: mol_type = other DNA
  modified_base 3244: mod_base = OTHER; note = uracil
atggcagcattcaaaccaaacccaatcaactacatcctaggactagacatcggaatcgcatcagtaggatgagcaatggtagaaatcgacgaagaagaaaacccaatccgactaatcgacctaggagtacgagtattcgaacgagcagaagtaccaaaaacaggagactcactagcaatggcacgacgactagcacgatcagtacgacgactaacacgacgacgagcacaccgactactacgagcacgacgactactaaaacgagaaggagtactacaagcagcagacttcgacgaaaacggactaatcaaatcactaccaaacacaccatgacaactacgagcagcagcactagaccgaaaactaacaccactagaatgatcagcagtactactacacctaatcaaacaccgaggatacctatcacaacgaaaaaacgaaggagaaacagcagacaaagaactaggagcactactaaaaggagtagcagacaacgcacacgcactacaaacaggagacttccgaacaccagcagaactagcactaaacaaattcgaaaaagaatgcggacacatccgaaaccaacgaggagactactcacacacattctcacgaaaagacctacaagcagaactaaacctactattcgaaaaacaaaaagaattcggaaacccacacgtatcaggaggactaaaagaaggaatcgaaacactactaatgacacaacgaccagcactatcaggagacgcagtacaaaaaatgctaggacactgcacattcgaaccagcagaaccaaaagcagcaaaaaacacatacacagcagaacgattcatctgactaacaaaactaaacaacctacgaatcctagaacaaggatcagaacgaccactaacagacacagaacgagcaacactaatggacgaaccataccgaaaatcaaaactaacatacgcacaagcacgaaaactactatcactagaagacacagcattcttcaaaggactacgatacggaaaagacaacgcagaagcatcaacactaatggaaatgaaagcataccacacaatctcacgagcactagaaaaagaaggactaaaagacaaaaaatcaccactaaacctatcaccagaactacaagacgaaatcggaacagcattctcactattcaaaacagacgaagacatcacaggacgactaaaagaccgaatccaaccagaaatcctagaagcactactaaaacacatctcattcgacaaattcgtacaaatctcactaaaagcactacgacgaatcgtaccactaatggaacaaggaaaacgatacgacgaagcatgcgcagaaatctacggagaccactacggaaaaaaaaacacagaagaaaaaatctacctaccaccaatcccagcagacgaaatccgaaacccagtagtactacgagcactatcacaagcacgaaaagtaatcaacggagtagtacgacgatacggatcaccagcacgaatccacatcgaaacagcacgagaagtaggaaaatcattcaaagaccgaaaagaaatcgaaaaacgacaagaagaaaaccgaaaagaccgagaaaaagcagcagcaaaattccgagaatacttcccaaacttcgtaggagaaccaaaatcaaaagacatcctaaaactacgactatacgaacaacaacacggaaaatgcctatactcaggaaaagaaatcaacctaggacgactaaacgaaaaaggatacgtagaaatcgacgcagcactaccattctcacgaacatgagacgactcattcaacaacaaagtactagtactaggatcagaaaaccaaaacaaaggaaaccaaacaccatacgaatacttcaacggaaaagacaactcacgagaatgacaagaattcaaagcacgagtagaaacatcacgattcccacgatcaaaaaaacaacgaatcctactacaaaaattcgacgaagacggattcaaagaacgaaacctaaacgacacacgatacgtaaaccgattcctatgccaattcgtagcagaccgaatgcgactaacaggaaaaggaaaaaaacgagtattcgcatcaaacggacaaatcacaaacctactacgaggattctgaggactacgaaaagtacgagcagaaaacgaccgacaccacgcactagacgcagtagtagtagcatgctcaacagtagcaatgcaacaaaaaatcacacgattcgtacgatacaaagaaatgaacgcattcgacggaaaaacaatcgacaaagaaacaggagaagtactacaccaaaaaacacacttcccacaaccatgagaattcttcgcacaagaagtaatgatccgagtattcggaaaaccagacggaaaaccagaattcgaagaagcagacacaccagaaaaactacgaacactactagcagaaaaactatcatcacgaccagaagcagtacacgaatacgtaacaccactattcgtatcacgagcaccaaaccgaaaaatgtcaggacaaggacacatggaaacagtaaaatcagcaaaacgactagacgaaggagtatcagtactacgagtaccactaacacaactaaaactaaaagacctagaaaaaatggtaaaccgagaacgagaaccaaaactatacgaagcactaaaagcacgactagaagcacacaaagacgacccagcaaaagcattcgcagaaccattctacaaatacgacaaagcaggaaaccgaacacaacaagtaaaagcagtacgagtagaacaagtacaaaaaacaggagtatgagtacgaaaccacaacggaatcgcagacaacgcaacaatggtacgagtagacgtattcgaaaaaggagacaaatactacctagtaccaatctactcatgacaagtagcaaaaggaatcctaccagaccgagcagtagtagcatacgcagacgaagaagactgaacagtaatcgacgaatcattccgattcaaattcgtactatactcaaacgacctaatcaaagtacaactaaaaaaagactcattcctaggatacttctcaggactagaccgagcaacaggagcaatctcactacgagaacacgacctagaaaaatcaaaaggaaaagacggaatgcaccgaatcggagtaaaaacagcactatcattccaaaaataccaaatcgacgaaatgggaaaagaaatccgaccatgccgactaaaaaaacgaccaccagtacgataa

SEQ ID NO: 226 - RNA, 76 nt, synthetic construct
  source 1..76: mol_type = other RNA
gttttagagctagaaatagcaagttaaaataaggctagtccgttatcaacttgaaaaagtggcaccgagtcggtgc

SEQ ID NO: 227 - RNA, 80 nt, synthetic construct
  source 1..80: mol_type = other RNA
gttttagagctagaaatagcaagttaaaataaggctagtccgttatcaacttgaaaaagtggcaccgagtcggtgctttt

SEQ ID NO: 228 - RNA, 100 nt, synthetic construct
  source 1..100: mol_type = other RNA
  misc_difference 1: note = 2'-O-methyl modified adenosine, cytidine, uridine, guanosine, unknown or other nucleotide with phosphorothioate linkage
  misc_difference 2: note = 2'-O-methyl modified adenosine, cytidine, uridine, guanosine, unknown or other nucleotide with phosphorothioate linkage
  misc_difference 3: note = 2'-O-methyl modified adenosine, cytidine, uridine, guanosine, unknown or other nucleotide with phosphorothioate linkage
  misc_difference 4: note = a, c, u, g, unknown or other
  misc_difference 5: note = a, c, u, g, unknown or other
  misc_difference 6: note = a, c, u, g, unknown or other
  misc_difference 7: note = a, c, u, g, unknown or other
  misc_difference 8: note = a, c, u, g, unknown or other
  misc_difference 9: note = a, c, u, g, unknown or other
  misc_difference 10: note = a, c, u, g, unknown or other
  misc_difference 11: note = a, c, u, g, unknown or other
  misc_difference 12: note = a, c, u, g, unknown or other
  misc_difference 13: note = a, c, u, g, unknown or other
  misc_difference 14: note = a, c, u, g, unknown or other
  misc_difference 15: note = a, c, u, g, unknown or other
  misc_difference 16: note = a, c, u, g, unknown or other
  misc_difference 17: note = a, c, u, g, unknown or other
  misc_difference 18: note = a, c, u, g, unknown or other
  misc_difference 19: note = a, c, u, g, unknown or other
  misc_difference 20: note = a, c, u, g, unknown or other
  modified_base 29: mod_base = OTHER; note = 2'-O-methyl modified nucleotide
  modified_base 30: mod_base = OTHER; note = 2'-O-methyl modified nucleotide
  modified_base 31: mod_base = OTHER; note = 2'-O-methyl modified nucleotide
  modified_base 32: mod_base = OTHER; note = 2'-O-methyl modified nucleotide
  modified_base 33: mod_base = OTHER; note = 2'-O-methyl modified nucleotide
  modified_base 34: mod_base = OTHER; note = 2'-O-methyl modified nucleotide
  modified_base 35: mod_base = OTHER; note = 2'-O-methyl modified nucleotide
  modified_base 36: mod_base = OTHER; note = 2'-O-methyl modified nucleotide
  modified_base 37: mod_base = OTHER; note = 2'-O-methyl modified nucleotide
  modified_base 38: mod_base = OTHER; note = 2'-O-methyl modified nucleotide
  modified_base 39: mod_base = OTHER; note = 2'-O-methyl modified nucleotide
  modified_base 40: mod_base = OTHER; note = 2'-O-methyl modified nucleotide
  modified_base 69: mod_base = OTHER; note = 2'-O-methyl modified nucleotide
  modified_base 70: mod_base = OTHER; note = 2'-O-methyl modified nucleotide
  modified_base 71: mod_base = OTHER; note = 2'-O-methyl modified nucleotide
  modified_base 72: mod_base = OTHER; note = 2'-O-methyl modified nucleotide
  modified_base 73: mod_base = OTHER; note = 2'-O-methyl modified nucleotide
  modified_base 74: mod_base = OTHER; note = 2'-O-methyl modified nucleotide
  modified_base 75: mod_base = OTHER; note = 2'-O-methyl modified nucleotide
  modified_base 76: mod_base = OTHER; note = 2'-O-methyl modified nucleotide
  modified_base 77: mod_base = OTHER; note = 2'-O-methyl modified nucleotide
  modified_base 78: mod_base = OTHER; note = 2'-O-methyl modified nucleotide
  modified_base 79: mod_base = OTHER; note = 2'-O-methyl modified nucleotide
  modified_base 80: mod_base = OTHER; note = 2'-O-methyl modified nucleotide
  modified_base 81: mod_base = OTHER; note = 2'-O-methyl modified nucleotide
  modified_base 82: mod_base = OTHER; note = 2'-O-methyl modified nucleotide
  modified_base 83: mod_base = OTHER; note = 2'-O-methyl modified nucleotide
  modified_base 84: mod_base = OTHER; note = 2'-O-methyl modified nucleotide
  modified_base 85: mod_base = OTHER; note = 2'-O-methyl modified nucleotide
  modified_base 86: mod_base = OTHER; note = 2'-O-methyl modified nucleotide
  modified_base 87: mod_base = OTHER; note = 2'-O-methyl modified nucleotide
  modified_base 88: mod_base = OTHER; note = 2'-O-methyl modified nucleotide
  modified_base 89: mod_base = OTHER; note = 2'-O-methyl modified nucleotide
  modified_base 90: mod_base = OTHER; note = 2'-O-methyl modified nucleotide
  modified_base 91: mod_base = OTHER; note = 2'-O-methyl modified nucleotide
  modified_base 92: mod_base = OTHER; note = 2'-O-methyl modified nucleotide
  modified_base 93: mod_base = OTHER; note = 2'-O-methyl modified nucleotide
  modified_base 94: mod_base = OTHER; note = 2'-O-methyl modified nucleotide
  modified_base 95: mod_base = OTHER; note = 2'-O-methyl modified nucleotide
  modified_base 96: mod_base = OTHER; note = 2'-O-methyl modified nucleotide
  modified_base 97: mod_base = OTHER; note = 2'-O-methyl modified nucleotide with phosphorothioate linkage
  modified_base 98: mod_base = OTHER; note = 2'-O-methyl modified nucleotide with phosphorothioate linkage
  modified_base 99: mod_base = OTHER; note = 2'-O-methyl modified nucleotide with phosphorothioate linkage
  modified_base 100: mod_base = OTHER; note = 2'-O-methyl modified nucleotide
nnnnnnnnnnnnnnnnnnnngttttagagctagaaatagcaagttaaaataaggctagtccgttatcaacttgaaaaagtggcaccgagtcggtgctttt

SEQ ID NO: 229 - RNA, 96 nt, synthetic construct
  source 1..96: mol_type = other RNA
  misc_difference 1: note = 2'-O-methyl modified adenosine, cytidine, uridine, guanosine, unknown or other nucleotide with phosphorothioate linkage
  misc_difference 2: note = 2'-O-methyl modified adenosine, cytidine, uridine, guanosine, unknown or other nucleotide with phosphorothioate linkage
  misc_difference 3: note = 2'-O-methyl modified adenosine, cytidine, uridine, guanosine, unknown or other nucleotide with phosphorothioate linkage
  misc_difference 4: note = a, c, u, g, unknown or other
  misc_difference 5: note = a, c, u, g, unknown or other
  misc_difference 6: note = a, c, u, g, unknown or other
  misc_difference 7: note = a, c, u, g, unknown or other
  misc_difference 8: note = a, c, u, g, unknown or other
  misc_difference 9: note = a, c, u, g, unknown or other
  misc_difference 10: note = a, c, u, g, unknown or other
  misc_difference 11: note = a, c, u, g, unknown or other
  misc_difference 12: note = a, c, u, g, unknown or other
  misc_difference 13: note = a, c, u, g, unknown or other
  misc_difference 14: note = a, c, u, g, unknown or other
  misc_difference 15: note = a, c, u, g, unknown or other
  misc_difference 16: note = a, c, u, g, unknown or other
  misc_difference 17: note = a, c, u, g, unknown or other
  misc_difference 18: note = a, c, u, g, unknown or other
  misc_difference 19: note = a, c, u, g, unknown or other
  misc_difference 20: note = a, c, u, g, unknown or other
  modified_base 29: mod_base = OTHER; note = 2'-O-methyl modified nucleotide
  modified_base 30: mod_base = OTHER; note = 2'-O-methyl modified nucleotide
  modified_base 31: mod_base = OTHER; note = 2'-O-methyl modified nucleotide
  modified_base 32: mod_base = OTHER; note = 2'-O-methyl modified nucleotide
  modified_base 33: mod_base = OTHER; note = 2'-O-methyl modified nucleotide
  modified_base 34: mod_base = OTHER; note = 2'-O-methyl modified nucleotide
  modified_base 35: mod_base = OTHER; note = 2'-O-methyl modified nucleotide
  modified_base 36: mod_base = OTHER; note = 2'-O-methyl modified nucleotide
  modified_base 37: mod_base = OTHER; note = 2'-O-methyl modified nucleotide
  modified_base 38: mod_base = OTHER; note = 2'-O-methyl modified nucleotide
  modified_base 39: mod_base = OTHER; note = 2'-O-methyl modified nucleotide
  modified_base 40: mod_base = OTHER; note = 2'-O-methyl modified nucleotide
  modified_base 69: mod_base = OTHER; note = 2'-O-methyl modified nucleotide
  modified_base 70: mod_base = OTHER; note = 2'-O-methyl modified nucleotide
  modified_base 71: mod_base = OTHER; note = 2'-O-methyl modified nucleotide
  modified_base 72: mod_base = OTHER; note = 2'-O-methyl modified nucleotide
  modified_base 73: mod_base = OTHER; note = 2'-O-methyl modified nucleotide
  modified_base 74: mod_base = OTHER; note = 2'-O-methyl modified nucleotide
  modified_base 75: mod_base = OTHER; note = 2'-O-methyl modified nucleotide
  modified_base 76: mod_base = OTHER; note = 2'-O-methyl modified nucleotide
  modified_base 77: mod_base = OTHER; note = 2'-O-methyl modified nucleotide
  modified_base 78: mod_base = OTHER; note = 2'-O-methyl modified nucleotide
  modified_base 79: mod_base = OTHER; note = 2'-O-methyl modified nucleotide
  modified_base 80: mod_base = OTHER; note = 2'-O-methyl modified nucleotide
  modified_base 81: mod_base = OTHER; note = 2'-O-methyl modified nucleotide
  modified_base 82: mod_base = OTHER; note = 2'-O-methyl modified nucleotide
  modified_base 83: mod_base = OTHER; note = 2'-O-methyl modified nucleotide
  modified_base 84: mod_base = OTHER; note = 2'-O-methyl modified nucleotide
  modified_base 85: mod_base = OTHER; note = 2'-O-methyl modified nucleotide
  modified_base 86: mod_base = OTHER; note = 2'-O-methyl modified nucleotide
  modified_base 87: mod_base = OTHER; note = 2'-O-methyl modified nucleotide
  modified_base 88: mod_base = OTHER; note = 2'-O-methyl modified nucleotide
  modified_base 89: mod_base = OTHER; note = 2'-O-methyl modified nucleotide
  modified_base 90: mod_base = OTHER; note = 2'-O-methyl modified nucleotide
  modified_base 91: mod_base = OTHER; note = 2'-O-methyl modified nucleotide
  modified_base 92: mod_base = OTHER; note = 2'-O-methyl modified nucleotide
  modified_base 93: mod_base = OTHER; note = 2'-O-methyl modified nucleotide
  modified_base 94: mod_base = OTHER; note = 2'-O-methyl modified nucleotide
  modified_base 95: mod_base = OTHER; note = 2'-O-methyl modified nucleotide
  modified_base 96: mod_base = OTHER; note = 2'-O-methyl modified nucleotide
nnnnnnnnnnnnnnnnnnnngttttagagctagaaatagcaagttaaaataaggctagtccgttatcaacttgaaaaagtggcaccgagtcggtgc

SEQ ID NO: 230 - RNA, 97 nt, synthetic construct
  source 1..97: mol_type = other RNA
  misc_difference 1: note = 2'-O-methyl modified adenosine, cytidine, uridine, guanosine, unknown or other nucleotide with phosphorothioate linkage
  misc_difference 2: note = 2'-O-methyl modified adenosine, cytidine, uridine, guanosine, unknown or other nucleotide with phosphorothioate linkage
  misc_difference 3: note = 2'-O-methyl modified adenosine, cytidine, uridine, guanosine, unknown or other nucleotide with phosphorothioate linkage
  misc_difference 4: note = a, c, u, g, unknown or other
  misc_difference 5: note = a, c, u, g, unknown or other
  misc_difference 6: note = a, c, u, g, unknown or other
  misc_difference 7: note = a, c, u, g, unknown or other
  misc_difference 8: note = a, c, u, g, unknown or other
  misc_difference 9: note = a, c, u, g, unknown or other
  misc_difference 10: note = a, c, u, g, unknown or other
  misc_difference 11: note = a, c, u, g, unknown or other
  misc_difference 12: note = a, c, u, g, unknown or other
  misc_difference 13: note = a, c, u, g, unknown or other
  misc_difference 14: note = a, c, u, g, unknown or other
  misc_difference 15: note = a, c, u, g, unknown or other
  misc_difference 16: note = a, c, u, g, unknown or other
  misc_difference 17: note = a, c, u, g, unknown or other
  misc_difference 18: note = a, c, u, g, unknown or other
  misc_difference 19: note = a, c, u, g, unknown or other
  misc_difference 20: note = a, c, u, g, unknown or other
  modified_base 29: mod_base = OTHER; note = 2'-O-methyl modified nucleotide
  modified_base 30: mod_base = OTHER; note = 2'-O-methyl modified nucleotide
  modified_base 31: mod_base = OTHER; note = 2'-O-methyl modified nucleotide
  modified_base 32: mod_base = OTHER; note = 2'-O-methyl modified nucleotide
  modified_base 33: mod_base = OTHER; note = 2'-O-methyl modified nucleotide
  modified_base 34: mod_base = OTHER; note = 2'-O-methyl modified nucleotide
  modified_base 35: mod_base = OTHER; note = 2'-O-methyl modified nucleotide
  modified_base 36: mod_base = OTHER; note = 2'-O-methyl modified nucleotide
  modified_base 37: mod_base = OTHER; note = 2'-O-methyl modified nucleotide
  modified_base 38: mod_base = OTHER; note = 2'-O-methyl modified nucleotide
  modified_base 39: mod_base = OTHER; note = 2'-O-methyl modified nucleotide
  modified_base 40: mod_base = OTHER; note = 2'-O-methyl modified nucleotide
  modified_base 69: mod_base = OTHER; note = 2'-O-methyl modified nucleotide
  modified_base 70: mod_base = OTHER; note = 2'-O-methyl modified nucleotide
  modified_base 71: mod_base = OTHER; note = 2'-O-methyl modified nucleotide
  modified_base 72: mod_base = OTHER; note = 2'-O-methyl modified nucleotide
  modified_base 73: mod_base = OTHER; note = 2'-O-methyl modified nucleotide
  modified_base 74: mod_base = OTHER; note = 2'-O-methyl modified nucleotide
  modified_base 75: mod_base = OTHER; note = 2'-O-methyl modified nucleotide
  modified_base 76: mod_base = OTHER; note = 2'-O-methyl modified nucleotide
  modified_base 77: mod_base = OTHER; note = 2'-O-methyl modified nucleotide
  modified_base 78: mod_base = OTHER; note = 2'-O-methyl modified nucleotide
  modified_base 79: mod_base = OTHER; note = 2'-O-methyl modified nucleotide
  modified_base 80: mod_base = OTHER; note = 2'-O-methyl modified nucleotide
  modified_base 81: mod_base = OTHER; note = 2'-O-methyl modified nucleotide
  modified_base 82: mod_base = OTHER; note = 2'-O-methyl modified nucleotide
  modified_base 83: mod_base = OTHER; note = 2'-O-methyl modified nucleotide
  modified_base 84: mod_base = OTHER; note = 2'-O-methyl modified nucleotide
  modified_base 85: mod_base = OTHER; note = 2'-O-methyl modified nucleotide
  modified_base 86: mod_base = OTHER; note = 2'-O-methyl modified nucleotide
  modified_base 87: mod_base = OTHER; note = 2'-O-methyl modified nucleotide
  modified_base 88: mod_base = OTHER; note = 2'-O-methyl modified nucleotide
  modified_base 89: mod_base = OTHER; note = 2'-O-methyl modified nucleotide
  modified_base 90: mod_base = OTHER; note = 2'-O-methyl modified nucleotide
  modified_base 91: mod_base = OTHER; note = 2'-O-methyl modified nucleotide
  modified_base 92: mod_base = OTHER; note = 2'-O-methyl modified nucleotide
  modified_base 93: mod_base = OTHER; note = 2'-O-methyl modified nucleotide
  modified_base 94: mod_base = OTHER; note = 2'-O-methyl modified nucleotide
  modified_base 95: mod_base = OTHER; note = 2'-O-methyl modified nucleotide
  modified_base 96: mod_base = OTHER; note = 2'-O-methyl modified nucleotide
  modified_base 97: mod_base = OTHER; note = 2'-O-methyl modified nucleotide
nnnnnnnnnnnnnnnnnnnngttttagagctagaaatagcaagttaaaataaggctagtccgttatcaacttgaaaaagtggcaccgagtcggtgct

SEQ ID NO: 231 - RNA, 88 nt, synthetic construct
  source 1..88: mol_type = other RNA
  misc_difference 1: note = 2'-O-methyl modified adenosine, cytidine, uridine, guanosine, unknown or other nucleotide with phosphorothioate linkage
  misc_difference 2: note = 2'-O-methyl modified adenosine, cytidine, uridine, guanosine, unknown or other nucleotide with phosphorothioate linkage
  misc_difference 3: note = 2'-O-methyl modified adenosine, cytidine, uridine, guanosine, unknown or other nucleotide with phosphorothioate linkage
  misc_difference 4: note = a, c, u, g, unknown or other
  misc_difference 5: note = a, c, u, g, unknown or other
  misc_difference 6: note = a, c, u, g, unknown or other
  misc_difference 7: note = a, c, u, g, unknown or other
  misc_difference 8: note = a, c, u, g, unknown or other
  misc_difference 9: note = a, c, u, g, unknown or other
  misc_difference 10: note = a, c, u, g, unknown or other
  misc_difference 11: note = a, c, u, g, unknown or other
  misc_difference 12: note = a, c, u, g, unknown or other
  misc_difference 13: note = a, c, u, g, unknown or other
  misc_difference 14: note = a, c, u, g, unknown or other
  misc_difference 15: note = a, c, u, g, unknown or other
  misc_difference 16: note = a, c, u, g, unknown or other
  misc_difference 17: note = a, c, u, g, unknown or other
  misc_difference 18: note = a, c, u, g, unknown or other
  misc_difference 19: note = a, c, u, g, unknown or other
  misc_difference 20: note = a, c, u, g, unknown or other
  modified_base 29: mod_base = OTHER; note = 2'-O-methyl modified nucleotide
  modified_base 30: mod_base = OTHER; note = 2'-O-methyl modified nucleotide
  modified_base 31: mod_base = OTHER; note = 2'-O-methyl modified nucleotide
  modified_base 32: mod_base = OTHER; note = 2'-O-methyl modified nucleotide
  modified_base 33: mod_base = OTHER; note = 2'-O-methyl modified nucleotide
  modified_base 34: mod_base = OTHER; note = 2'-O-methyl modified nucleotide
  modified_base 35: mod_base = OTHER; note = 2'-O-methyl modified nucleotide
  modified_base 36: mod_base = OTHER; note = 2'-O-methyl modified nucleotide
  modified_base 37: mod_base = OTHER; note = 2'-O-methyl modified nucleotide
  modified_base 38: mod_base = OTHER; note = 2'-O-methyl modified nucleotide
  modified_base 39: mod_base = OTHER; note = 2'-O-methyl modified nucleotide
  modified_base 40: mod_base = OTHER; note = 2'-O-methyl modified nucleotide
  modified_base 85: mod_base = OTHER; note = Nucleotide with phosphorothioate linkage
  modified_base 86: mod_base = OTHER; note = 2'-O-methyl modified nucleotide with phosphorothioate linkage
  modified_base 87: mod_base = OTHER; note = 2'-O-methyl modified nucleotide with phosphorothioate linkage
  modified_base 88: mod_base = OTHER; note = 2'-O-methyl modified nucleotide
nnnnnnnnnnnnnnnnnnnngttttagagctagaaatagcaagttaaaataaggctagtccgttatcaacttggcaccgagtcggtgc

SEQ ID NO: 232 - RNA, 88 nt, synthetic construct
  source 1..88: mol_type = other RNA
  misc_difference 1: note = 2'-O-methyl modified adenosine, cytidine, uridine, guanosine, unknown or other nucleotide with phosphorothioate linkage
  misc_difference 2: note = 2'-O-methyl modified adenosine, cytidine, uridine, guanosine, unknown or other nucleotide with phosphorothioate linkage
  misc_difference 3: note = 2'-O-methyl modified adenosine, cytidine, uridine, guanosine, unknown or other nucleotide with phosphorothioate linkage
  misc_difference 4: note = a, c, u, g, unknown or other
  misc_difference 5: note = a, c, u, g, unknown or other
  misc_difference 6: note = a, c, u, g, unknown or other
  misc_difference 7: note = a, c, u, g, unknown or other
  misc_difference 8: note = a, c, u, g, unknown or other
  misc_difference 9: note = a, c, u, g, unknown or other
  misc_difference 10: note = a, c, u, g, unknown or other
  misc_difference 11: note = a, c, u, g, unknown or other
  misc_difference 12: note = a, c, u, g, unknown or other
  misc_difference 13: note = a, c, u, g, unknown or other
  misc_difference 14: note = a, c, u, g, unknown or other
  misc_difference 15: note = a, c, u, g, unknown or other
  misc_difference 16: note = a, c, u, g, unknown or other
  misc_difference 17: note = a, c, u, g, unknown or other
  misc_difference 18: note = a, c, u, g, unknown or other
  misc_difference 19: note = a, c, u, g, unknown or other
  misc_difference 20: note = a, c, u, g, unknown or other
  modified_base 29: mod_base = OTHER; note = 2'-O-methyl modified nucleotide
  modified_base 30: mod_base = OTHER; note = 2'-O-methyl modified nucleotide
  modified_base 31: mod_base = OTHER; note = 2'-O-methyl modified nucleotide
  modified_base 32: mod_base = OTHER; note = 2'-O-methyl modified nucleotide
  modified_base 33: mod_base = OTHER; note = 2'-O-methyl modified nucleotide
  modified_base 34: mod_base = OTHER; note = 2'-O-methyl modified nucleotide
  modified_base 35: mod_base = OTHER; note = 2'-O-methyl modified nucleotide
  modified_base 36: mod_base = OTHER; note = 2'-O-methyl modified nucleotide
  modified_base 37: mod_base = OTHER; note = 2'-O-methyl modified nucleotide
  modified_base 38: mod_base = OTHER; note = 2'-O-methyl modified nucleotide
  modified_base 39: mod_base = OTHER; note = 2'-O-methyl modified nucleotide
  modified_base 40: mod_base = OTHER; note = 2'-O-methyl modified nucleotide
  modified_base 85: mod_base = OTHER; note = Nucleotide with phosphorothioate linkage
  modified_base 86: mod_base = OTHER; note = 2'-O-methyl modified nucleotide with phosphorothioate linkage
  modified_base 87: mod_base = OTHER; note = 2'-O-methyl modified nucleotide with phosphorothioate linkage
  modified_base 88: mod_base = OTHER; note = 2'-O-methyl modified nucleotide
nnnnnnnnnnnnnnnnnnnngttttagagctagaaatagcaagttaaaataaggctagtccgttatcaaaatggcaccgagtcggtgc

SEQ ID NO: 233 - RNA, 88 nt, synthetic construct; identical to SEQ ID NO: 232
  source 1..88: mol_type = other RNA
  misc_difference 1: note = 2'-O-methyl modified adenosine, cytidine, uridine, guanosine, unknown or other nucleotide with phosphorothioate linkage
  misc_difference 2: note = 2'-O-methyl modified adenosine, cytidine, uridine, guanosine, unknown or other nucleotide with phosphorothioate linkage
  misc_difference 3: note = 2'-O-methyl modified adenosine, cytidine, uridine, guanosine, unknown or other nucleotide with phosphorothioate linkage
  misc_difference 4: note = a, c, u, g, unknown or other
  misc_difference 5: note = a, c, u, g, unknown or other
  misc_difference 6: note = a, c, u, g, unknown or other
  misc_difference 7: note = a, c, u, g, unknown or other
  misc_difference 8: note = a, c, u, g, unknown or other
  misc_difference 9: note = a, c, u, g, unknown or other
  misc_difference 10: note = a, c, u, g, unknown or other
  misc_difference 11: note = a, c, u, g, unknown or other
  misc_difference 12: note = a, c, u, g, unknown or other
  misc_difference 13: note = a, c, u, g, unknown or other
  misc_difference 14: note = a, c, u, g, unknown or other
  misc_difference 15: note = a, c, u, g, unknown or other
  misc_difference 16: note = a, c, u, g, unknown or other
  misc_difference 17: note = a, c, u, g, unknown or other
  misc_difference 18: note = a, c, u, g, unknown or other
  misc_difference 19: note = a, c, u, g, unknown or other
  misc_difference 20: note = a, c, u, g, unknown or other
  modified_base 29: mod_base = OTHER; note = 2'-O-methyl modified nucleotide
  modified_base 30: mod_base = OTHER; note = 2'-O-methyl modified nucleotide
  modified_base 31: mod_base = OTHER; note = 2'-O-methyl modified nucleotide
  modified_base 32: mod_base = OTHER; note = 2'-O-methyl modified nucleotide
  modified_base 33: mod_base = OTHER; note = 2'-O-methyl modified nucleotide
  modified_base 34: mod_base = OTHER; note = 2'-O-methyl modified nucleotide
  modified_base 35: mod_base = OTHER; note = 2'-O-methyl modified nucleotide
  modified_base 36: mod_base = OTHER; note = 2'-O-methyl modified nucleotide
  modified_base 37: mod_base = OTHER; note = 2'-O-methyl modified nucleotide
  modified_base 38: mod_base = OTHER; note = 2'-O-methyl modified nucleotide
  modified_base 39: mod_base = OTHER; note = 2'-O-methyl modified nucleotide
  modified_base 40: mod_base = OTHER; note = 2'-O-methyl modified nucleotide
  modified_base 69: mod_base = OTHER; note = 2'-O-methyl modified nucleotide
  modified_base 70: mod_base = OTHER; note = 2'-O-methyl modified nucleotide
  modified_base 71: mod_base = OTHER; note = 2'-O-methyl modified nucleotide
  modified_base 72: mod_base = OTHER; note = 2'-O-methyl modified nucleotide
  modified_base 73: mod_base = OTHER; note = 2'-O-methyl modified nucleotide
  modified_base 74: mod_base = OTHER; note = 2'-O-methyl modified nucleotide
  modified_base 75: mod_base = OTHER; note = 2'-O-methyl modified nucleotide
  modified_base 76: mod_base = OTHER; note = 2'-O-methyl modified nucleotide
  modified_base 77: mod_base = OTHER; note = 2'-O-methyl modified nucleotide
  modified_base 78: mod_base = OTHER; note = 2'-O-methyl modified nucleotide
  modified_base 79: mod_base = OTHER; note = 2'-O-methyl modified nucleotide
  modified_base 80: mod_base = OTHER; note = 2'-O-methyl modified nucleotide
  modified_base 81: mod_base = OTHER; note = 2'-O-methyl modified nucleotide
  modified_base 82: mod_base = OTHER; note = 2'-O-methyl modified nucleotide
  modified_base 83: mod_base = OTHER; note = 2'-O-methyl modified nucleotide
  modified_base 84: mod_base = OTHER; note = 2'-O-methyl modified nucleotide
  modified_base 85: mod_base = OTHER; note = 2'-O-methyl modified nucleotide with phosphorothioate linkage
  modified_base 86: mod_base = OTHER; note = 2'-O-methyl modified nucleotide with phosphorothioate linkage
  modified_base 87: mod_base = OTHER; note = 2'-O-methyl modified nucleotide with phosphorothioate linkage
  modified_base 88: mod_base = OTHER; note = 2'-O-methyl modified nucleotide

SEQ ID NO: 234 - RNA, 90 nt, synthetic construct
  source 1..90: mol_type = other RNA
  misc_difference 1: note = 2'-O-methyl modified adenosine, cytidine, uridine, guanosine, unknown or other nucleotide with phosphorothioate linkage
  misc_difference 2: note = 2'-O-methyl modified adenosine, cytidine, uridine, guanosine, unknown or other nucleotide with phosphorothioate linkage
  misc_difference 3: note = 2'-O-methyl modified adenosine, cytidine, uridine, guanosine, unknown or other nucleotide with phosphorothioate linkage
  misc_difference 4: note = a, c, u, g, unknown or other
  misc_difference 5: note = a, c, u, g, unknown or other
  misc_difference 6: note = a, c, u, g, unknown or other
  misc_difference 7: note = a, c, u, g, unknown or other
  misc_difference 8: note = a, c, u, g, unknown or other
  misc_difference 9: note = a, c, u, g, unknown or other
  misc_difference 10: note = a, c, u, g, unknown or other
  misc_difference 11: note = a, c, u, g, unknown or other
  misc_difference 12: note = a, c, u, g, unknown or other
  misc_difference 13: note = a, c, u, g, unknown or other
  misc_difference 14: note = a, c, u, g, unknown or other
  misc_difference 15: note = a, c, u, g, unknown or other
  misc_difference 16: note = a, c, u, g, unknown or other
  misc_difference 17: note = a, c, u, g, unknown or other
  misc_difference 18: note = a, c, u, g, unknown or other
  misc_difference 19: note = a, c, u, g, unknown or other
  misc_difference 20: note = a, c, u, g, unknown or other
  modified_base 29: mod_base = OTHER; note = 2'-O-methyl modified nucleotide
  modified_base 30: mod_base = OTHER; note = 2'-O-methyl modified nucleotide
  modified_base 31: mod_base = OTHER; note = 2'-O-methyl modified nucleotide
  modified_base 32: mod_base = OTHER; note = 2'-O-methyl modified nucleotide
  modified_base 33: mod_base = OTHER; note = 2'-O-methyl modified nucleotide
  modified_base 34: mod_base = OTHER; note = 2'-O-methyl modified nucleotide
  modified_base 35: mod_base = OTHER; note = 2'-O-methyl modified nucleotide
  modified_base 36: mod_base = OTHER; note = 2'-O-methyl modified nucleotide
  modified_base 37: mod_base = OTHER; note = 2'-O-methyl modified nucleotide
  modified_base 38: mod_base = OTHER; note = 2'-O-methyl modified nucleotide
  modified_base 39: mod_base = OTHER; note = 2'-O-methyl modified nucleotide
  modified_base 40: mod_base = OTHER; note = 2'-O-methyl modified nucleotide
  modified_base 87: mod_base = OTHER; note = Nucleotide with phosphorothioate linkage
  modified_base 88: mod_base = OTHER; note = 2'-O-methyl modified nucleotide with phosphorothioate linkage
  modified_base 89: mod_base = OTHER; note = 2'-O-methyl modified nucleotide with phosphorothioate linkage
  modified_base 90: mod_base = OTHER; note = 2'-O-methyl modified nucleotide
nnnnnnnnnnnnnnnnnnnngttttagagctagaaatagcaagttaaaataaggctagtccgttatcacgaaagggcaccgagtcggtgc

SEQ ID NO: 235 - RNA, 90 nt, synthetic construct; identical to SEQ ID NO: 234
  source 1..90: mol_type = other RNA
  misc_difference 1: note = 2'-O-methyl modified adenosine, cytidine, uridine, guanosine, unknown or other nucleotide with phosphorothioate linkage
  misc_difference 2: note = 2'-O-methyl modified adenosine, cytidine, uridine, guanosine, unknown or other nucleotide with phosphorothioate linkage
  misc_difference 3: note = 2'-O-methyl modified adenosine, cytidine, uridine, guanosine, unknown or other nucleotide with phosphorothioate linkage
  misc_difference 4: note = a, c, u, g, unknown or other
  misc_difference 5: note = a, c, u, g, unknown or other
  misc_difference 6: note = a, c, u, g, unknown or other
  misc_difference 7: note = a, c, u, g, unknown or other
  misc_difference 8: note = a, c, u, g, unknown or other
  misc_difference 9: note = a, c, u, g, unknown or other
  misc_difference 10: note = a, c, u, g, unknown or other
  misc_difference 11: note = a, c, u, g, unknown or other
  misc_difference 12: note = a, c, u, g, unknown or other
  misc_difference 13: note = a, c, u, g, unknown or other
  misc_difference 14: note = a, c, u, g, unknown or other
  misc_difference 15: note = a, c, u, g, unknown or other
  misc_difference 16: note = a, c, u, g, unknown or other
  misc_difference 17: note = a, c, u, g, unknown or other
  misc_difference 18: note = a, c, u, g, unknown or other
  misc_difference 19: note = a, c, u, g, unknown or other
  misc_difference 20: note = a, c, u, g, unknown or other
  modified_base 29: mod_base = OTHER; note = 2'-O-methyl modified nucleotide
  modified_base 30: mod_base = OTHER; note = 2'-O-methyl modified nucleotide
  modified_base 31: mod_base = OTHER; note = 2'-O-methyl modified nucleotide
  modified_base 32: mod_base = OTHER; note = 2'-O-methyl modified nucleotide
  modified_base 33: mod_base = OTHER; note = 2'-O-methyl modified nucleotide
  modified_base 34: mod_base = OTHER; note = 2'-O-methyl modified nucleotide
  modified_base 35: mod_base = OTHER; note = 2'-O-methyl modified nucleotide
  modified_base 36: mod_base = OTHER; note = 2'-O-methyl modified nucleotide
  modified_base 37: mod_base = OTHER; note = 2'-O-methyl modified nucleotide
  modified_base 38: mod_base = OTHER; note = 2'-O-methyl modified nucleotide
  modified_base 39: mod_base = OTHER; note = 2'-O-methyl modified nucleotide
  modified_base 40: mod_base = OTHER; note = 2'-O-methyl modified nucleotide
  modified_base 69: mod_base = OTHER; note = 2'-O-methyl modified nucleotide
  modified_base 70: mod_base = OTHER; note = 2'-O-methyl modified nucleotide
  modified_base 71: mod_base = OTHER; note = 2'-O-methyl modified nucleotide
  modified_base 72: mod_base = OTHER; note = 2'-O-methyl modified nucleotide
  modified_base 73: mod_base = OTHER; note = 2'-O-methyl modified nucleotide
  modified_base 74: mod_base = OTHER; note = 2'-O-methyl modified nucleotide
  modified_base 75: mod_base = OTHER; note = 2'-O-methyl modified nucleotide
  modified_base 76: mod_base = OTHER; note = 2'-O-methyl modified nucleotide
  modified_base 77: mod_base = OTHER; note = 2'-O-methyl modified nucleotide
  modified_base 78: mod_base = OTHER; note = 2'-O-methyl modified nucleotide
  modified_base 79: mod_base = OTHER; note = 2'-O-methyl modified nucleotide
  modified_base 80: mod_base = OTHER; note = 2'-O-methyl modified nucleotide
  modified_base 81: mod_base = OTHER; note = 2'-O-methyl modified nucleotide
  modified_base 82: mod_base = OTHER; note = 2'-O-methyl modified nucleotide
  modified_base 83: mod_base = OTHER; note = 2'-O-methyl modified nucleotide
  modified_base 84: mod_base = OTHER; note = 2'-O-methyl modified nucleotide
  modified_base 85: mod_base = OTHER; note = 2'-O-methyl modified nucleotide
  modified_base 86: mod_base = OTHER; note = 2'-O-methyl modified nucleotide
  modified_base 87: mod_base = OTHER; note = 2'-O-methyl modified nucleotide with phosphorothioate linkage
  modified_base 88: mod_base = OTHER; note = 2'-O-methyl modified nucleotide with phosphorothioate linkage
  modified_base 89: mod_base = OTHER; note = 2'-O-methyl modified nucleotide with phosphorothioate linkage
  modified_base 90: mod_base = OTHER; note = 2'-O-methyl modified nucleotide

SEQ ID NO: 236 - RNA, 91 nt, synthetic construct
  source 1..91: mol_type = other RNA
  misc_difference 1: note = 2'-O-methyl modified adenosine, cytidine, uridine, guanosine, unknown or other nucleotide with phosphorothioate linkage
  misc_difference 2: note = 2'-O-methyl modified adenosine, cytidine, uridine, guanosine, unknown or other nucleotide with phosphorothioate linkage
  misc_difference 3: note = 2'-O-methyl modified adenosine, cytidine, uridine, guanosine, unknown or other nucleotide with phosphorothioate linkage
  misc_difference 4: note = a, c, u, g, unknown or other
  misc_difference 5: note = a, c, u, g, unknown or other
  misc_difference 6: note = a, c, u, g, unknown or other
  misc_difference 7: note = a, c, u, g, unknown or other
  misc_difference 8: note = a, c, u, g, unknown or other
  misc_difference 9: note = a, c, u, g, unknown or other
  misc_difference 10: note = a, c, u, g, unknown or other
  misc_difference 11: note = a, c, u, g, unknown or other
  misc_difference 12: note = a, c, u, g, unknown or other
  misc_difference 13: note = a, c, u, g, unknown or other
  misc_difference 14: note = a, c, u, g, unknown or other
  misc_difference 15: note = a, c, u, g, unknown or other
  misc_difference 16: note = a, c, u, g, unknown or other
  misc_difference 17: note = a, c, u, g, unknown or other
  misc_difference 18: note = a, c, u, g, unknown or other
  misc_difference 19: note = a, c, u, g, unknown or other
  misc_difference 20: note = a, c, u, g, unknown or other
  modified_base 29: mod_base = OTHER; note = 2'-O-methyl modified nucleotide
  modified_base 30: mod_base = OTHER; note = 2'-O-methyl modified nucleotide
  modified_base 31: mod_base = OTHER; note = 2'-O-methyl modified nucleotide
  modified_base 32: mod_base = OTHER; note = 2'-O-methyl modified nucleotide
  modified_base 33: mod_base = OTHER; note = 2'-O-methyl modified nucleotide
  modified_base 34: mod_base = OTHER; note = 2'-O-methyl modified nucleotide
  modified_base 35: mod_base = OTHER; note = 2'-O-methyl modified nucleotide
  modified_base 36: mod_base = OTHER; note = 2'-O-methyl modified nucleotide
  modified_base 37: mod_base = OTHER; note = 2'-O-methyl modified nucleotide
  modified_base 38: mod_base = OTHER; note = 2'-O-methyl modified nucleotide
  modified_base 39: mod_base = OTHER; note = 2'-O-methyl modified nucleotide
  modified_base 40: mod_base = OTHER; note = 2'-O-methyl modified nucleotide
  modified_base 88: mod_base = OTHER; note = Nucleotide with phosphorothioate linkage
  modified_base 89: mod_base = OTHER; note = 2'-O-methyl modified nucleotide with phosphorothioate linkage
  modified_base 90: mod_base = OTHER; note = 2'-O-methyl modified nucleotide with phosphorothioate linkage
  modified_base 91: mod_base = OTHER; note = 2'-O-methyl modified nucleotide
nnnnnnnnnnnnnnnnnnnngttttagagctagaaatagcaagttaaaataaggctagtccgttatcacgaaagggcaccgagtcggtgct

SEQ ID NO: 237 - RNA, 91 nt, synthetic construct; identical to SEQ ID NO: 236
  source 1..91: mol_type = other RNA
  misc_difference 1: note = 2'-O-methyl modified adenosine, cytidine, uridine, guanosine, unknown or other nucleotide with phosphorothioate linkage
  misc_difference 2: note = 2'-O-methyl modified adenosine, cytidine, uridine, guanosine, unknown or other nucleotide with phosphorothioate linkage
  misc_difference 3: note = 2'-O-methyl modified adenosine, cytidine, uridine, guanosine, unknown or other nucleotide with phosphorothioate linkage
  misc_difference 4: note = a, c, u, g, unknown or other
  misc_difference 5: note = a, c, u, g, unknown or other
  misc_difference 6: note = a, c, u, g, unknown or other
  misc_difference 7: note = a, c, u, g, unknown or other
  misc_difference 8: note = a, c, u, g, unknown or other
  misc_difference 9: note = a, c, u, g, unknown or other
  misc_difference 10: note = a, c, u, g, unknown or other
  misc_difference 11: note = a, c, u, g, unknown or other
  misc_difference 12: note = a, c, u, g, unknown or other
  misc_difference 13: note = a, c, u, g, unknown or other
  misc_difference 14: note = a, c, u, g, unknown or other
  misc_difference 15: note = a, c, u, g, unknown or other
  misc_difference 16: note = a, c, u, g, unknown or other
  misc_difference 17: note = a, c, u, g, unknown or other
  misc_difference 18: note = a, c, u, g, unknown or other
  misc_difference 19: note = a, c, u, g, unknown or other
  misc_difference 20: note = a, c, u, g, unknown or other
  modified_base 29: mod_base = OTHER; note = 2'-O-methyl modified nucleotide
  modified_base 30: mod_base = OTHER; note = 2'-O-methyl modified nucleotide
  modified_base 31: mod_base = OTHER; note = 2'-O-methyl modified nucleotide
  modified_base 32: mod_base = OTHER; note = 2'-O-methyl modified nucleotide
  modified_base 33: mod_base = OTHER; note = 2'-O-methyl modified nucleotide
  modified_base 34: mod_base = OTHER; note = 2'-O-methyl modified nucleotide
  modified_base 35: mod_base = OTHER; note = 2'-O-methyl modified nucleotide
  modified_base 36: mod_base = OTHER; note = 2'-O-methyl modified nucleotide
  modified_base 37: mod_base = OTHER; note = 2'-O-methyl modified nucleotide
  modified_base 38: mod_base = OTHER; note = 2'-O-methyl modified nucleotide
  modified_base 39: mod_base = OTHER; note = 2'-O-methyl modified nucleotide
  modified_base 40: mod_base = OTHER; note = 2'-O-methyl modified nucleotide
  modified_base 88: mod_base = OTHER; note = 2'-O-methyl modified nucleotide
  modified_base 89: mod_base = OTHER; note = 2'-O-methyl modified nucleotide
  modified_base 90: mod_base = OTHER; note = 2'-O-methyl modified nucleotide with phosphorothioate linkage
  modified_base 91: mod_base = OTHER; note = 2'-O-methyl modified nucleotide

SEQ ID NO: 238 - RNA, 91 nt, synthetic construct; identical to SEQ ID NO: 236
  source 1..91: mol_type = other RNA
  misc_difference 1: note = 2'-O-methyl modified adenosine, cytidine, uridine, guanosine, unknown or other nucleotide with phosphorothioate linkage
  misc_difference 2: note = 2'-O-methyl modified adenosine, cytidine, uridine, guanosine, unknown or other nucleotide with phosphorothioate linkage
  misc_difference 3: note = 2'-O-methyl modified adenosine, cytidine, uridine, guanosine, unknown or other nucleotide with phosphorothioate linkage
  misc_difference 4: note = a, c, u, g, unknown or other
  misc_difference 5: note = a, c, u, g, unknown or other
  misc_difference 6: note = a, c, u, g, unknown or other
  misc_difference 7: note = a, c, u, g, unknown or other
  misc_difference 8: note = a, c, u, g, unknown or other
  misc_difference 9: note = a, c, u, g, unknown or other
  misc_difference 10: note = a, c, u, g, unknown or other
  misc_difference 11: note = a, c, u, g, unknown or other
  misc_difference 12: note = a, c, u, g, unknown or other
  misc_difference 13: note = a, c, u, g, unknown or other
  misc_difference 14: note = a, c, u, g, unknown or other
  misc_difference 15: note = a, c, u, g, unknown or other
  misc_difference 16: note = a, c, u, g, unknown or other
  misc_difference 17: note = a, c, u, g, unknown or other
  misc_difference 18: note = a, c, u, g, unknown or other
  misc_difference 19: note = a, c, u, g, unknown or other
  misc_difference 20: note = a, c, u, g, unknown or other
  modified_base 25: mod_base = OTHER; note = 2'-fluoro modified nucleotide
  modified_base 28: mod_base = OTHER; note = 2'-O-methyl modified nucleotide
  modified_base 29: mod_base = OTHER; note = 2'-O-methyl modified nucleotide
  modified_base 30: mod_base = OTHER; note = 2'-O-methyl modified nucleotide
  modified_base 31: mod_base = OTHER; note = 2'-O-methyl modified nucleotide
  modified_base 32: mod_base = OTHER; note = 2'-O-methyl modified nucleotide
  modified_base 33: mod_base = OTHER; note = 2'-O-methyl modified nucleotide
  modified_base 34: mod_base = OTHER; note = 2'-O-methyl modified nucleotide
  modified_base 35: mod_base = OTHER; note = 2'-O-methyl modified nucleotide
  modified_base 36: mod_base = OTHER; note = 2'-O-methyl modified nucleotide
  modified_base 37: mod_base = OTHER; note = 2'-O-methyl modified nucleotide
  modified_base 38: mod_base = OTHER; note = 2'-O-methyl modified nucleotide
  modified_base 39: mod_base = OTHER; note = 2'-O-methyl modified nucleotide
  modified_base 40: mod_base = OTHER; note = 2'-O-methyl modified nucleotide
  modified_base 41: mod_base = OTHER; note = 2'-O-methyl modified nucleotide
  modified_base 42: mod_base = OTHER; note = 2'-O-methyl modified nucleotide
  modified_base 45: mod_base = OTHER; note = 2'-fluoro modified nucleotide
  modified_base 46: mod_base = OTHER; note = 2'-O-methyl modified nucleotide
  modified_base 47: mod_base = OTHER; note = 2'-fluoro modified nucleotide
  modified_base 48: mod_base = OTHER; note = 2'-O-methyl modified nucleotide
  modified_base 49: mod_base = OTHER; note = 2'-fluoro modified nucleotide
  modified_base 50: mod_base = OTHER; note = 2'-O-methyl modified nucleotide
  modified_base 52: mod_base = OTHER; note = 2'-O-methyl modified nucleotide
  modified_base 53: mod_base = OTHER; note = 2'-O-methyl modified nucleotide
  modified_base 54: mod_base = OTHER; note = 2'-O-methyl modified nucleotide
  modified_base 55: mod_base = OTHER; note = 2'-O-methyl modified nucleotide
  modified_base 56: mod_base = OTHER; note = 2'-O-methyl modified nucleotide
  modified_base 57: mod_base = OTHER; note = 2'-O-methyl modified nucleotide
  modified_base 60: mod_base = OTHER; note = 2'-O-methyl modified nucleotide
  modified_base 61: mod_base = OTHER; note = 2'-O-methyl modified nucleotide
  modified_base 64: mod_base = OTHER; note = 2'-fluoro modified nucleotide
  modified_base 66: mod_base = OTHER; note = 2'-O-methyl modified nucleotide
  modified_base 67: mod_base = OTHER; note = 2'-O-methyl modified nucleotide
  modified_base 69: mod_base = OTHER; note = 2'-O-methyl modified nucleotide
  modified_base 70: mod_base = OTHER; note = 2'-O-methyl modified nucleotide
  modified_base 71: mod_base = OTHER; note = 2'-O-methyl modified nucleotide
  modified_base 72: mod_base = OTHER; note = 2'-O-methyl modified nucleotide
  modified_base 73: mod_base = OTHER; note = 2'-O-methyl modified nucleotide
  modified_base 74: mod_base = OTHER; note = 2'-O-methyl modified nucleotide
  modified_base 75: mod_base = OTHER; note = 2'-O-methyl modified nucleotide
  modified_base 76: mod_base = OTHER; note = 2'-O-methyl modified nucleotide
  modified_base 77: mod_base = OTHER; note = 2'-O-methyl modified nucleotide
  modified_base 78: mod_base = OTHER; note = 2'-O-methyl modified nucleotide
  modified_base 79: mod_base = OTHER; note = 2'-O-methyl modified nucleotide
  modified_base 80: mod_base = OTHER; note = 2'-O-methyl modified nucleotide
  modified_base 81: mod_base = OTHER; note = 2'-O-methyl modified nucleotide
  modified_base 82: mod_base = OTHER; note = 2'-O-methyl modified nucleotide
  modified_base 83: mod_base = OTHER; note = 2'-O-methyl modified nucleotide
  modified_base 84: mod_base = OTHER; note = 2'-O-methyl modified nucleotide
  modified_base 85: mod_base = OTHER; note = 2'-O-methyl modified nucleotide
  modified_base 86: mod_base = OTHER; note = 2'-O-methyl modified nucleotide
  modified_base 87: mod_base = OTHER; note = 2'-O-methyl modified nucleotide
  modified_base 88: mod_base = OTHER; note = 2'-O-methyl modified nucleotide with phosphorothioate linkage
  modified_base 89: mod_base = OTHER; note = 2'-O-methyl modified nucleotide with phosphorothioate linkage
  modified_base 90: mod_base = OTHER; note = 2'-O-methyl modified nucleotide with phosphorothioate linkage
  modified_base 91: mod_base = OTHER; note = 2'-O-methyl modified nucleotide

SEQ ID NO: 239 - RNA, 91 nt, synthetic construct; identical to SEQ ID NO: 236
  source 1..91: mol_type = other RNA
  misc_difference 1: note = 2'-O-methyl modified adenosine, cytidine, uridine, guanosine, unknown or other nucleotide with phosphorothioate linkage
  misc_difference 2: note = 2'-O-methyl modified adenosine, cytidine, uridine, guanosine, unknown or other nucleotide with phosphorothioate linkage
  misc_difference 3: note = 2'-O-methyl modified adenosine, cytidine, uridine, guanosine, unknown or other nucleotide with phosphorothioate linkage
  misc_difference 4: note = a, c, u, g, unknown or other
  misc_difference 5: note = a, c, u, g, unknown or other
  misc_difference 6: note = a, c, u, g, unknown or other
  misc_difference 7: note = a, c, u, g, unknown or other
  misc_difference 8: note = a, c, u, g, unknown or other
  misc_difference 9: note = a, c, u, g, unknown or other
  misc_difference 10: note = a, c, u, g, unknown or other
  misc_difference 11: note = a, c, u, g, unknown or other
  misc_difference 12: note = a, c, u, g, unknown or other
  misc_difference 13: note = a, c, u, g, unknown or other
  misc_difference 14: note = a, c, u, g, unknown or other
  misc_difference 15: note = a, c, u, g, unknown or other
  misc_difference 16: note = a, c, u, g, unknown or other
  misc_difference 17: note = a, c, u, g, unknown or other
  misc_difference 18: note = a, c, u, g, unknown or other
  misc_difference 19: note = a, c, u, g, unknown or other
  misc_difference 20: note = a, c, u, g, unknown or other
  modified_base 29: mod_base = OTHER; note = 2'-O-methyl modified nucleotide
  modified_base 30: mod_base = OTHER; note = 2'-O-methyl modified nucleotide
  modified_base 31: mod_base = OTHER; note = 2'-O-methyl modified nucleotide
  modified_base 32: mod_base = OTHER; note = 2'-O-methyl modified nucleotide
  modified_base 33: mod_base = OTHER; note = 2'-O-methyl modified nucleotide
  modified_base 34: mod_base = OTHER; note = 2'-O-methyl modified nucleotide
  modified_base 35: mod_base = OTHER; note = 2'-O-methyl modified nucleotide
  modified_base 36: mod_base = OTHER; note = 2'-O-methyl modified nucleotide
  modified_base 37: mod_base = OTHER; note = 2'-O-methyl modified nucleotide
  modified_base 38: mod_base = OTHER; note = 2'-O-methyl modified nucleotide
  modified_base 39: mod_base = OTHER; note = 2'-O-methyl modified nucleotide
  modified_base 40: mod_base = OTHER; note = 2'-O-methyl modified nucleotide
  modified_base 88: mod_base = OTHER; note = 2'-O-methyl modified nucleotide with phosphorothioate linkage
  modified_base 89: mod_base = OTHER; note = 2'-O-methyl modified nucleotide with phosphorothioate linkage
  modified_base 90: mod_base = OTHER; note = 2'-O-methyl modified nucleotide with phosphorothioate linkage
  modified_base 91: mod_base = OTHER; note = 2'-O-methyl modified nucleotide

SEQ ID NO: 240 - RNA, 96 nt, synthetic construct; identical to SEQ ID NO: 229
  source 1..96: mol_type = other RNA
  misc_difference 1: note = 2'-O-methyl modified adenosine, cytidine, uridine, guanosine, unknown or other nucleotide with phosphorothioate linkage
  misc_difference 2: note = 2'-O-methyl modified adenosine, cytidine, uridine, guanosine, unknown or other nucleotide with phosphorothioate linkage
  misc_difference 3: note = 2'-O-methyl modified adenosine, cytidine, uridine, guanosine, unknown or other nucleotide with phosphorothioate linkage
  misc_difference 4: note = a, c, u, g, unknown or other
  misc_difference 5: note = a, c, u, g, unknown or other
  misc_difference 6: note = a, c, u, g, unknown or other
  misc_difference 7: note = a, c, u, g, unknown or other
  misc_difference 8: note = a, c, u, g, unknown or other
  misc_difference 9: note = a, c, u, g, unknown or other
  misc_difference 10: note = a, c, u, g, unknown or other
  misc_difference 11: note = a, c, u, g, unknown or other
  misc_difference 12: note = a, c, u, g, unknown or other
  misc_difference 13: note = a, c, u, g, unknown or other
  misc_difference 14: note = a, c, u, g, unknown or other
  misc_difference 15: note = a, c, u, g, unknown or other
  misc_difference 16: note = a, c, u, g, unknown or other
  misc_difference 17: note = a, c, u, g, unknown or other
  misc_difference 18: note = a, c, u, g, unknown or other
  misc_difference 19: note = a, c, u, g, unknown or other
  misc_difference 20: note = a, c, u, g, unknown or other
  modified_base 29: mod_base = OTHER; note = 2'-O-methyl modified nucleotide
  modified_base 30: mod_base = OTHER; note = 2'-O-methyl modified nucleotide
  modified_base 31: mod_base = OTHER; note = 2'-O-methyl modified nucleotide
  modified_base 32: mod_base = OTHER; note = 2'-O-methyl modified nucleotide
  modified_base 33: mod_base = OTHER; note = 2'-O-methyl modified nucleotide
  modified_base 34: mod_base = OTHER; note = 2'-O-methyl modified nucleotide
  modified_base 35: mod_base = OTHER; note = 2'-O-methyl modified nucleotide
  modified_base 36: mod_base = OTHER; note = 2'-O-methyl modified nucleotide
  modified_base 37: mod_base = OTHER; note = 2'-O-methyl modified nucleotide
  modified_base 38: mod_base = OTHER; note = 2'-O-methyl modified nucleotide
  modified_base 39: mod_base = OTHER; note = 2'-O-methyl modified nucleotide
  modified_base 40: mod_base = OTHER; note = 2'-O-methyl modified nucleotide
  modified_base 69: mod_base = OTHER; note = 2'-O-methyl modified nucleotide
  modified_base 70: mod_base = OTHER; note = 2'-O-methyl modified nucleotide
  modified_base 71: mod_base = OTHER; note = 2'-O-methyl modified nucleotide
  modified_base 72: mod_base = OTHER; note = 2'-O-methyl modified nucleotide
  modified_base 73: mod_base = OTHER; note = 2'-O-methyl modified nucleotide
  modified_base 74: mod_base = OTHER; note = 2'-O-methyl modified nucleotide
  modified_base 75: mod_base = OTHER; note = 2'-O-methyl modified nucleotide
  modified_base 76: mod_base = OTHER; note = 2'-O-methyl modified nucleotide
  modified_base 77: mod_base = OTHER; note = 2'-O-methyl modified nucleotide
  modified_base 78: mod_base = OTHER; note = 2'-O-methyl modified nucleotide
  modified_base 79: mod_base = OTHER; note = 2'-O-methyl modified nucleotide
  modified_base 80: mod_base = OTHER; note = 2'-O-methyl modified nucleotide
  modified_base 81: mod_base = OTHER; note = 2'-O-methyl modified nucleotide
  modified_base 82: mod_base = OTHER; note = 2'-O-methyl modified nucleotide
  modified_base 83: mod_base = OTHER; note = 2'-O-methyl modified nucleotide
  modified_base 84: mod_base = OTHER; note = 2'-O-methyl modified nucleotide
  modified_base 85: mod_base = OTHER; note = 2'-O-methyl modified nucleotide
  modified_base 86: mod_base = OTHER; note = 2'-O-methyl modified nucleotide
  modified_base 87: mod_base = OTHER; note = 2'-O-methyl modified nucleotide
  modified_base 88: mod_base = OTHER; note = 2'-O-methyl modified nucleotide
  modified_base 89: mod_base = OTHER; note = 2'-O-methyl modified nucleotide
  modified_base 90: mod_base = OTHER; note = 2'-O-methyl modified nucleotide
  modified_base 91: mod_base = OTHER; note = 2'-O-methyl modified nucleotide
  modified_base 92: mod_base = OTHER; note = 2'-O-methyl modified nucleotide
  modified_base 93: mod_base = OTHER; note = 2'-O-methyl modified nucleotide
  modified_base 94: mod_base = OTHER; note = 2'-O-methyl modified nucleotide
  modified_base 95: mod_base = OTHER; note = 2'-O-methyl modified nucleotide
  modified_base 96: mod_base = OTHER; note = 2'-O-methyl modified nucleotide

SEQ ID NO: 241 - RNA, 97 nt, synthetic construct; identical to SEQ ID NO: 230
  source 1..97: mol_type = other RNA
  misc_difference 1: note = 2'-O-methyl modified adenosine, cytidine, uridine, guanosine, unknown or other nucleotide with phosphorothioate linkage
  misc_difference 2: note = 2'-O-methyl modified adenosine, cytidine, uridine, guanosine, unknown or other nucleotide with phosphorothioate linkage
  misc_difference 3: note = 2'-O-methyl modified adenosine, cytidine, uridine, guanosine, unknown or other nucleotide with phosphorothioate linkage
  misc_difference 4: note = a, c, u, g, unknown or other
  misc_difference 5: note = a, c, u, g, unknown or other
  misc_difference 6: note = a, c, u, g, unknown or other
  misc_difference 7: note = a, c, u, g, unknown or other
  misc_difference 8: note = a, c, u, g, unknown or other
  misc_difference 9: note = a, c, u, g, unknown or other
  misc_difference 10: note = a, c, u, g, unknown or other
  misc_difference 11: note = a, c, u, g, unknown or other
  misc_difference 12: note = a, c, u, g, unknown or other
  misc_difference 13: note = a, c, u, g, unknown or other
  misc_difference 14: note = a, c, u, g, unknown or other
  misc_difference 15: note = a, c, u, g, unknown or other
  misc_difference 16: note = a, c, u, g, unknown or other
  misc_difference 17: note = a, c, u, g, unknown or other
  misc_difference 18: note = a, c, u, g, unknown or other
  misc_difference 19: note = a, c, u, g, unknown or other
  misc_difference 20: note = a, c, u, g, unknown or other
  modified_base 29: mod_base = OTHER; note = 2'-O-methyl modified nucleotide
  modified_base 30: mod_base = OTHER; note = 2'-O-methyl modified nucleotide
  modified_base 31: mod_base = OTHER; note = 2'-O-methyl modified nucleotide
  modified_base 32: mod_base = OTHER; note = 2'-O-methyl modified nucleotide
  modified_base 33: mod_base = OTHER; note = 2'-O-methyl modified nucleotide
  modified_base 34: mod_base = OTHER; note = 2'-O-methyl modified nucleotide
  modified_base 35: mod_base = OTHER; note = 2'-O-methyl modified nucleotide
  modified_base 36: mod_base = OTHER; note = 2'-O-methyl modified nucleotide
  modified_base 37: mod_base = OTHER; note = 2'-O-methyl modified nucleotide
  modified_base 38: mod_base = OTHER; note = 2'-O-methyl modified nucleotide
  modified_base 39: mod_base = OTHER; note = 2'-O-methyl modified nucleotide
  modified_base 40: mod_base = OTHER; note = 2'-O-methyl modified nucleotide
  modified_base 69: mod_base = OTHER; note = 2'-O-methyl modified nucleotide
  modified_base 70: mod_base = OTHER; note = 2'-O-methyl modified nucleotide
  modified_base 71: mod_base = OTHER; note = 2'-O-methyl modified nucleotide
  modified_base 72: mod_base = OTHER; note = 2'-O-methyl modified nucleotide
  modified_base 73: mod_base = OTHER; note = 2'-O-methyl modified nucleotide
  modified_base 74: mod_base = OTHER; note = 2'-O-methyl modified nucleotide
  modified_base 75: mod_base = OTHER; note = 2'-O-methyl modified nucleotide
  modified_base 76: mod_base = OTHER; note = 2'-O-methyl modified nucleotide
  modified_base 77: mod_base = OTHER; note = 2'-O-methyl modified nucleotide
  modified_base 78: mod_base = OTHER; note = 2'-O-methyl modified nucleotide
  modified_base 79: mod_base = OTHER; note = 2'-O-methyl modified nucleotide
  modified_base 80: mod_base = OTHER; note = 2'-O-methyl modified nucleotide
  modified_base 81: mod_base = OTHER; note = 2'-O-methyl modified nucleotide
  modified_base 82: mod_base = OTHER; note = 2'-O-methyl modified nucleotide
  modified_base 83: mod_base = OTHER; note = 2'-O-methyl modified nucleotide
  modified_base 84: mod_base = OTHER; note = 2'-O-methyl modified nucleotide
  modified_base 85: mod_base = OTHER; note = 2'-O-methyl modified nucleotide
  modified_base 86: mod_base = OTHER; note = 2'-O-methyl modified nucleotide
  modified_base 87: mod_base = OTHER; note = 2'-O-methyl modified nucleotide
  modified_base 88: mod_base = OTHER; note = 2'-O-methyl modified nucleotide
  modified_base 89: mod_base = OTHER; note = 2'-O-methyl modified nucleotide
  modified_base 90: mod_base = OTHER; note = 2'-O-methyl modified nucleotide
  modified_base 91: mod_base = OTHER; note = 2'-O-methyl modified nucleotide
  modified_base 92: mod_base = OTHER; note = 2'-O-methyl modified nucleotide
  modified_base 93: mod_base = OTHER; note = 2'-O-methyl modified nucleotide
  modified_base 94: mod_base = OTHER; note = 2'-O-methyl modified nucleotide
  modified_base 95: mod_base = OTHER; note = 2'-O-methyl modified nucleotide
  modified_base 96: mod_base = OTHER; note = 2'-O-methyl modified nucleotide
  modified_base 97: mod_base = OTHER; note = 2'-O-methyl modified nucleotide

SEQ ID NO: 242 - RNA, 88 nt, synthetic construct; identical to SEQ ID NO: 231
  source 1..88: mol_type = other RNA
  misc_difference 1: note = 2'-O-methyl modified adenosine, cytidine, uridine, guanosine, unknown or other nucleotide with phosphorothioate linkage
  misc_difference 2: note = 2'-O-methyl modified adenosine, cytidine, uridine, guanosine, unknown or other nucleotide with phosphorothioate linkage
  misc_difference 3: note = 2'-O-methyl modified adenosine, cytidine, uridine, guanosine, unknown or other nucleotide with phosphorothioate linkage
  misc_difference 4: note = a, c, u, g, unknown or other
  misc_difference 5: note = a, c, u, g, unknown or other
  misc_difference 6: note = a, c, u, g, unknown or other
  misc_difference 7: note = a, c, u, g, unknown or other
  misc_difference 8: note = a, c, u, g, unknown or other
  misc_difference 9: note = a, c, u, g, unknown or other
  misc_difference 10: note = a, c, u, g, unknown or other
  misc_difference 11: note = a, c, u, g, unknown or other
  misc_difference 12: note = a, c, u, g, unknown or other
  misc_difference 13: note = a, c, u, g, unknown or other
  misc_difference 14: note = a, c, u, g, unknown or other
  misc_difference 15: note = a, c, u, g, unknown or other
  misc_difference 16: note = a, c, u, g, unknown or other
  misc_difference 17: note = a, c, u, g, unknown or other
  misc_difference 18: note = a, c, u, g, unknown or other
  misc_difference 19: note = a, c, u, g, unknown or other
  misc_difference 20: note = a, c, u, g, unknown or other
  modified_base 29: mod_base = OTHER; note = 2'-O-methyl modified nucleotide
  modified_base 30: mod_base = OTHER; note = 2'-O-methyl modified nucleotide
  modified_base 31: mod_base = OTHER; note = 2'-O-methyl modified nucleotide
  modified_base 32: mod_base = OTHER; note = 2'-O-methyl modified nucleotide
  modified_base 33: mod_base = OTHER; note = 2'-O-methyl modified nucleotide
  modified_base 34: mod_base = OTHER; note = 2'-O-methyl modified nucleotide
  modified_base 35: mod_base = OTHER; note = 2'-O-methyl modified nucleotide
  modified_base 36: mod_base = OTHER; note = 2'-O-methyl modified nucleotide
  modified_base 37: mod_base = OTHER; note = 2'-O-methyl modified nucleotide
  modified_base 38: mod_base = OTHER; note = 2'-O-methyl modified nucleotide
  modified_base 39: mod_base = OTHER; note = 2'-O-methyl modified nucleotide
  modified_base 40: mod_base = OTHER; note = 2'-O-methyl modified nucleotide
  modified_base 85: mod_base = OTHER; note = Nucleotide with phosphorothioate linkage
  modified_base 86: mod_base = OTHER; note = 2'-O-methyl modified nucleotide with phosphorothioate linkage
  modified_base 87: mod_base = OTHER; note = 2'-O-methyl modified nucleotide with phosphorothioate linkage
  modified_base 88: mod_base = OTHER; note = 2'-O-methyl modified nucleotide

SEQ ID NO: 243 - RNA, 121 nt, synthetic construct
  source 1..121: mol_type = other RNA
gttgtagctccctttctcatttcggaaacgaaatgagaaccgttgctacaataaggccgtctgaaaagatgtgccgcaacgctctgccccttaaagcttctgctttaaggggcatcgttta

SEQ ID NO: 244 - RNA, 77 nt, synthetic construct
  source 1..77: mol_type = other RNA
gttgtagctccctgaaaccgttgctacaataaggccgtcgaaagatgtgccgcaacgctctgccttctggcatcgtt

SEQ ID NO: 245 - RNA, 83 nt, synthetic construct
  source 1..83: mol_type = other RNA
gttgtagctccctggaaacccgttgctacaataaggccgtcgaaagatgtgccgcaacgctctgccttctggcatcgtttatt

SEQ ID NO: 246 - RNA, 77 nt, synthetic construct; identical to SEQ ID NO: 244
  source 1..77: mol_type = other RNA
  modified_base 5: mod_base = OTHER; note = 2'-O-methyl modified nucleotide
  modified_base 6: mod_base = OTHER; note = 2'-O-methyl modified nucleotide
  modified_base 7: mod_base = OTHER; note = 2'-O-methyl modified nucleotide
  modified_base 8: mod_base = OTHER; note = 2'-O-methyl modified nucleotide
  modified_base 13: mod_base = OTHER; note = 2'-O-methyl modified nucleotide
  modified_base 14: mod_base = OTHER; note = 2'-O-methyl modified nucleotide
  modified_base 15: mod_base = OTHER; note = 2'-O-methyl modified nucleotide
  modified_base 16: mod_base = OTHER; note = 2'-O-methyl modified nucleotide
  modified_base 17: mod_base = OTHER; note = 2'-O-methyl modified nucleotide
  modified_base 18: mod_base = OTHER; note = 2'-O-methyl modified nucleotide
  modified_base 19: mod_base = OTHER; note = 2'-O-methyl modified nucleotide
  modified_base 23: mod_base = OTHER; note = 2'-O-methyl modified nucleotide
  modified_base 24: mod_base = OTHER; note = 2'-O-methyl modified nucleotide
  modified_base 27: mod_base = OTHER; note = 2'-O-methyl modified nucleotide
  modified_base 30: mod_base = OTHER; note = Nucleotide with phosphorothioate linkage
  modified_base 34: mod_base = OTHER; note = 2'-O-methyl modified nucleotide
  modified_base 35: mod_base = OTHER; note = 2'-O-methyl modified nucleotide
  modified_base 37: mod_base = OTHER; note = 2'-O-methyl modified nucleotide
  modified_base 38: mod_base = OTHER; note = 2'-O-methyl modified nucleotide
  modified_base 39: mod_base = OTHER; note = 2'-O-methyl modified nucleotide
  modified_base 40: mod_base = OTHER; note = 2'-O-methyl modified nucleotide
  modified_base 41: mod_base = OTHER; note = 2'-O-methyl modified nucleotide
  modified_base 42: mod_base = OTHER; note = 2'-O-methyl modified nucleotide
  modified_base 43: mod_base = OTHER; note = 2'-O-methyl modified nucleotide
  modified_base 44: mod_base = OTHER; note = 2'-O-methyl modified nucleotide
  modified_base 45: mod_base = OTHER; note = 2'-O-methyl modified nucleotide
  modified_base 46: mod_base = OTHER; note = 2'-O-methyl modified nucleotide
  modified_base 51: mod_base = OTHER; note = 2'-O-methyl modified nucleotide
  modified_base 54: mod_base = OTHER; note = 2'-O-methyl modified nucleotide
  modified_base 55: mod_base = OTHER; note = 2'-O-methyl modified nucleotide
  modified_base 56: mod_base = OTHER; note = 2'-O-methyl modified nucleotide
  modified_base 57: mod_base = OTHER; note = 2'-O-methyl modified nucleotide
  modified_base 62: mod_base = OTHER; note = 2'-O-methyl modified nucleotide
  modified_base 63: mod_base = OTHER; note = 2'-O-methyl modified nucleotide
  modified_base 65: mod_base = OTHER; note = 2'-O-methyl modified nucleotide
  modified_base 66: mod_base = OTHER; note = 2'-O-methyl modified nucleotide
  modified_base 67: mod_base = OTHER; note = 2'-O-methyl modified nucleotide
  modified_base 68: mod_base = OTHER; note = 2'-O-methyl modified nucleotide
  modified_base 70: mod_base = OTHER; note = 2'-O-methyl modified nucleotide
  modified_base 72: mod_base = OTHER; note = 2'-O-methyl modified nucleotide
  modified_base 73: mod_base = OTHER; note = 2'-O-methyl modified nucleotide
  modified_base 74: mod_base = OTHER; note = Nucleotide with phosphorothioate linkage
  modified_base 75: mod_base = OTHER; note = 2'-O-methyl modified nucleotide with phosphorothioate linkage
  modified_base 76: mod_base = OTHER; note = 2'-O-methyl modified nucleotide with phosphorothioate linkage
  modified_base 77: mod_base = OTHER; note = 2'-O-methyl modified nucleotide

SEQ ID NO: 247 - RNA, 77 nt, synthetic construct; identical to SEQ ID NO: 244
  source 1..77: mol_type = other RNA
  modified_base 5: mod_base = OTHER; note = 2'-O-methyl modified nucleotide
  modified_base 6: mod_base = OTHER; note = 2'-O-methyl modified nucleotide
  modified_base 7: mod_base = OTHER; note = 2'-O-methyl modified nucleotide
  modified_base 8: mod_base = OTHER; note = 2'-O-methyl modified nucleotide
  modified_base 13: mod_base = OTHER; note = 2'-O-methyl modified nucleotide
  modified_base 14: mod_base = OTHER; note = 2'-O-methyl modified nucleotide
  modified_base 15: mod_base = OTHER; note = 2'-O-methyl modified nucleotide
  modified_base 16: mod_base = OTHER; note = 2'-O-methyl modified nucleotide
  modified_base 17: mod_base = OTHER; note = 2'-O-methyl modified nucleotide
  modified_base 18: mod_base = OTHER; note = 2'-O-methyl modified nucleotide
  modified_base 19: mod_base = OTHER; note = 2'-O-methyl modified nucleotide
  modified_base 23: mod_base = OTHER; note = 2'-O-methyl modified nucleotide
  modified_base 24: mod_base = OTHER; note = 2'-O-methyl modified nucleotide
  modified_base 27: mod_base = OTHER; note = 2'-O-methyl modified nucleotide
  modified_base 30: mod_base = OTHER; note = Nucleotide with phosphorothioate linkage
  modified_base 34: mod_base = OTHER; note = 2'-O-methyl modified nucleotide
  modified_base 35: mod_base = OTHER; note = 2'-O-methyl modified nucleotide
  modified_base 37: mod_base = OTHER; note = 2'-O-methyl modified nucleotide
  modified_base 38: mod_base = OTHER; note = 2'-O-methyl modified nucleotide
  modified_base 39: mod_base = OTHER; note = 2'-O-methyl modified nucleotide
  modified_base 40: mod_base = OTHER; note = 2'-O-methyl modified nucleotide
  modified_base 41: mod_base = OTHER; note = 2'-O-methyl modified nucleotide
  modified_base 42: mod_base = OTHER; note = 2'-O-methyl modified nucleotide
  modified_base 43: mod_base = OTHER; note = 2'-O-methyl modified nucleotide
  modified_base 44: mod_base = OTHER; note = 2'-O-methyl modified nucleotide
  modified_base 45: mod_base = OTHER; note = 2'-O-methyl modified nucleotide
  modified_base 46: mod_base = OTHER; note = 2'-O-methyl modified nucleotide
  modified_base 51: mod_base = OTHER; note = 2'-O-methyl modified nucleotide
  modified_base 53: mod_base = OTHER; note = 2'-O-methyl modified nucleotide
  modified_base 56: mod_base = OTHER; note = 2'-O-methyl modified nucleotide
  modified_base 62: mod_base = OTHER; note = 2'-O-methyl modified nucleotide
  modified_base 63: mod_base = OTHER; note = 2'-O-methyl modified nucleotide
  modified_base 65: mod_base = OTHER; note = 2'-O-methyl modified nucleotide
  modified_base 66: mod_base = OTHER; note = 2'-O-methyl modified nucleotide
  modified_base 67: mod_base = OTHER; note = 2'-O-methyl modified nucleotide
  modified_base 68: mod_base = OTHER; note = 2'-O-methyl modified nucleotide
  modified_base 75: mod_base = OTHER; note = Nucleotide with phosphorothioate linkage
  modified_base 76: mod_base = OTHER; note = 2'-O-methyl modified nucleotide with phosphorothioate linkage
  modified_base 77: mod_base = OTHER; note = 2'-O-methyl modified nucleotide

SEQ ID NO: 248 - RNA, 101 nt, synthetic construct
  source 1..101: mol_type = other RNA
  misc_difference 1: note = 2'-O-methyl modified adenosine, cytidine, uridine, guanosine, unknown or other nucleotide with phosphorothioate linkage
  misc_difference 2: note = 2'-O-methyl modified adenosine, cytidine, uridine, guanosine, unknown or other nucleotide
  misc_difference 3: note = a, c, u, g, unknown or other
  misc_difference 4: note = a, c, u, g, unknown or other
  misc_difference 5: note = a, c, u, g, unknown or other
  misc_difference 6: note = a, c, u, g, unknown or other
  misc_difference 7: note = a, c, u, g, unknown or other
  misc_difference 8: note = a, c, u, g, unknown or other
  misc_difference 9: note = a, c, u, g, unknown or other
  misc_difference 10: note = 2'-O-methyl modified adenosine, cytidine, uridine, guanosine, unknown or other nucleotide
  misc_difference 11: note = a, c, u, g, unknown or other
  misc_difference 12: note = a, c, u, g, unknown or other
  misc_difference 13: note = 2'-O-methyl modified adenosine, cytidine, uridine, guanosine, unknown or other nucleotide
  misc_difference 14: note = a, c, u, g, unknown or other
  misc_difference 15: note = a, c, u, g, unknown or other
  misc_difference 16: note = a, c, u, g, unknown or other
  misc_difference 17: note = a, c, u, g, unknown or other
  misc_difference 18: note = a, c, u, g, unknown or other
  misc_difference 19: note = a, c, u, g, unknown or other
  misc_difference 20: note = a, c, u, g, unknown or other
  misc_difference 21: note = a, c, u, g, unknown or other
  misc_difference 22: note = a, c, u, g, unknown or other
  misc_difference 23: note = a, c, u, g, unknown or other
  misc_difference 24: note = a, c, u, g, unknown or other
  modified_base 25: mod_base = OTHER; note = 2'-O-methyl modified nucleotide
  modified_base 29: mod_base = OTHER; note = 2'-O-methyl modified nucleotide
  modified_base 30: mod_base = OTHER; note = 2'-O-methyl modified nucleotide
  modified_base 31: mod_base = OTHER; note = 2'-O-methyl modified nucleotide
  modified_base 32: mod_base = OTHER; note = 2'-O-methyl modified nucleotide
  modified_base 37: mod_base = OTHER; note = 2'-O-methyl modified nucleotide
  modified_base 38: mod_base = OTHER; note = 2'-O-methyl modified nucleotide
  modified_base 39: mod_base = OTHER; note = 2'-O-methyl modified nucleotide
  modified_base 40: mod_base = OTHER; note = 2'-O-methyl modified nucleotide
  modified_base 41: mod_base = OTHER; note = 2'-O-methyl modified nucleotide
  modified_base 42: mod_base = OTHER; note = 2'-O-methyl modified nucleotide
  modified_base 43: mod_base = OTHER; note = 2'-O-methyl modified nucleotide
  modified_base 47: mod_base = OTHER; note = 2'-O-methyl modified nucleotide
  modified_base 48: mod_base = OTHER; note = 2'-O-methyl modified nucleotide
  modified_base 51: mod_base = OTHER; note = 2'-O-methyl modified nucleotide
  modified_base 54: mod_base = OTHER; note = Nucleotide with phosphorothioate linkage
  modified_base 58: mod_base = OTHER; note = 2'-O-methyl modified nucleotide
  modified_base 59: mod_base = OTHER; note = 2'-O-methyl modified nucleotide
  modified_base 61: mod_base = OTHER; note = 2'-O-methyl modified nucleotide
  modified_base 62: mod_base = OTHER; note = 2'-O-methyl modified nucleotide
  modified_base 63: mod_base = OTHER; note = 2'-O-methyl modified nucleotide
  modified_base 64: mod_base = OTHER; note = 2'-O-methyl modified nucleotide
  modified_base 65: mod_base = OTHER; note = 2'-O-methyl modified nucleotide
  modified_base 66: mod_base = OTHER; note = 2'-O-methyl modified nucleotide
  modified_base 67: mod_base = OTHER; note = 2'-O-methyl modified nucleotide
  modified_base 68: mod_base = OTHER; note = 2'-O-methyl modified nucleotide
  modified_base 69: mod_base = OTHER; note = 2'-O-methyl modified nucleotide
  modified_base 70: mod_base = OTHER; note = 2'-O-methyl modified nucleotide
  modified_base 75: mod_base = OTHER; note = 2'-O-methyl modified nucleotide
  modified_base 78: mod_base = OTHER; note = 2'-O-methyl modified nucleotide
  modified_base 79: mod_base = OTHER; note = 2'-O-methyl modified nucleotide
  modified_base 80: mod_base = OTHER; note = 2'-O-methyl modified nucleotide
  modified_base 81: mod_base = OTHER; note = 2'-O-methyl modified nucleotide
  modified_base 86: mod_base = OTHER; note = 2'-O-methyl modified nucleotide
  modified_base 87: mod_base = OTHER; note = 2'-O-methyl modified nucleotide
  modified_base 89: mod_base = OTHER; note = 2'-O-methyl modified nucleotide
  modified_base 90: mod_base = OTHER; note = 2'-O-methyl modified nucleotide
  modified_base 91: mod_base = OTHER; note = 2'-O-methyl modified nucleotide
  modified_base 92: mod_base = OTHER; note = 2'-O-methyl modified nucleotide
  modified_base 94: mod_base = OTHER; note = 2'-O-methyl modified nucleotide
  modified_base 96: mod_base = OTHER; note = 2'-O-methyl modified nucleotide
  modified_base 97: mod_base = OTHER; note = 2'-O-methyl modified nucleotide
  modified_base 98: mod_base = OTHER; note = Nucleotide with phosphorothioate linkage
  modified_base 99: mod_base = OTHER; note = 2'-O-methyl modified nucleotide with phosphorothioate linkage
  modified_base 100: mod_base = OTHER; note = 2'-O-methyl modified nucleotide with phosphorothioate linkage
  modified_base 101: mod_base = OTHER; note = 2'-O-methyl modified nucleotide
nnnnnnnnnnnnnnnnnnnnnnnngttgtagctccctgaaaccgttgctacaataaggccgtcgaaagatgtgccgcaacgctctgccttctggcatcgtt

SEQ ID NO: 249 - RNA, 102 nt, synthetic construct
  source 1..102: mol_type = other RNA
  misc_difference 1: note = a, c, u, g, unknown or other
  misc_difference 2: note = a, c, u, g, unknown or other
  misc_difference 3: note = a, c, u, g, unknown or other
  misc_difference 4: note = a, c, u, g, unknown or other
  misc_difference 5: note = a, c, u, g, unknown or other
  misc_difference 6: note = a, c, u, g, unknown or other
  misc_difference 7: note = a, c, u, g, unknown or other
  misc_difference 8: note = a, c, u, g, unknown or other
  misc_difference 9: note = a, c, u, g, unknown or other
  misc_difference 10: note = a, c, u, g, unknown or other
  misc_difference 11: note = a, c, u, g, unknown or other
  misc_difference 12: note = a, c, u, g, unknown or other
  misc_difference 13: note = a, c, u, g, unknown or other
  misc_difference 14: note = a, c, u, g, unknown or other
  misc_difference 15: note = a, c, u, g, unknown or other
  misc_difference 16: note = a, c, u, g, unknown or other
  misc_difference 17: note = a, c, u, g, unknown or other
  misc_difference 18: note = a, c, u, g, unknown or other
  misc_difference 19: note = a, c, u, g, unknown or other
  misc_difference 20: note = a, c, u, g, unknown or other
  misc_difference 21: note = a, c, u, g, unknown or other
  misc_difference 22: note = a, c, u, g, unknown or other
  misc_difference 23: note = a, c, u, g, unknown or other
  misc_difference 24: note = a, c, u, g, unknown or other
  misc_difference 25: note = a, c, u, g, unknown or other
  modified_base 30: mod_base = OTHER; note = 2'-O-methyl modified nucleotide
  modified_base 31: mod_base = OTHER; note = 2'-O-methyl modified nucleotide
  modified_base 32: mod_base = OTHER; note = 2'-O-methyl modified nucleotide
  modified_base 33: mod_base = OTHER; note = 2'-O-methyl modified nucleotide
  modified_base 38: mod_base = OTHER; note = 2'-O-methyl modified nucleotide
  modified_base 39: mod_base = OTHER; note = 2'-O-methyl modified nucleotide
  modified_base 40: mod_base = OTHER; note = 2'-O-methyl modified nucleotide
  modified_base 41: mod_base = OTHER; note = 2'-O-methyl modified nucleotide
  modified_base 42: mod_base = OTHER; note = 2'-O-methyl modified nucleotide
  modified_base 43: mod_base = OTHER; note = 2'-O-methyl modified nucleotide
  modified_base 44: mod_base = OTHER; note = 2'-O-methyl modified nucleotide
  modified_base 48: mod_base = OTHER; note = 2'-O-methyl modified nucleotide
  modified_base 49: mod_base = OTHER; note = 2'-O-methyl modified nucleotide
  modified_base 52: mod_base = OTHER; note = 2'-O-methyl modified nucleotide
  modified_base 55: mod_base = OTHER; note = Nucleotide with phosphorothioate linkage
  modified_base 59: mod_base = OTHER; note = 2'-O-methyl modified nucleotide
  modified_base 60: mod_base = OTHER; note = 2'-O-methyl modified nucleotide
  modified_base 62: mod_base = OTHER; note = 2'-O-methyl modified nucleotide
  modified_base 63: mod_base = OTHER; note = 2'-O-methyl modified nucleotide
  modified_base 64: mod_base = OTHER; note = 2'-O-methyl modified nucleotide
  modified_base 65: mod_base = OTHER; note = 2'-O-methyl modified nucleotide
  modified_base 66: mod_base = OTHER; note = 2'-O-methyl modified nucleotide
  modified_base 67: mod_base = OTHER; note = 2'-O-methyl modified nucleotide
  modified_base 68: mod_base = OTHER; note = 2'-O-methyl modified nucleotide
  modified_base 69: mod_base = OTHER; note = 2'-O-methyl modified nucleotide
  modified_base 70: mod_base = OTHER; note = 2'-O-methyl modified nucleotide
  modified_base 71: mod_base = OTHER; note = 2'-O-methyl modified nucleotide
  modified_base 76: mod_base = OTHER; note = 2'-O-methyl modified nucleotide
  modified_base 79: mod_base = OTHER; note = 2'-O-methyl modified nucleotide
  modified_base 80: mod_base = OTHER; note = 2'-O-methyl modified nucleotide
  modified_base 81: mod_base = OTHER; note = 2'-O-methyl modified nucleotide
  modified_base 82: mod_base = OTHER; note = 2'-O-methyl modified nucleotide
  modified_base 87: mod_base = OTHER; note = 2'-O-methyl modified nucleotide
  modified_base 88: mod_base = OTHER; note = 2'-O-methyl modified nucleotide
  modified_base 90: mod_base = OTHER; note = 2'-O-methyl modified nucleotide
  modified_base 91: mod_base = OTHER; note = 2'-O-methyl modified nucleotide
  modified_base 92: mod_base = OTHER; note = 2'-O-methyl modified nucleotide
  modified_base 93: mod_base = OTHER; note = 2'-O-methyl modified nucleotide
  modified_base 95: mod_base = OTHER; note = 2'-O-methyl modified nucleotide
  modified_base 97: mod_base = OTHER; note = 2'-O-methyl modified nucleotide
  modified_base 98: mod_base = OTHER; note = 2'-O-methyl modified nucleotide
  modified_base 99: mod_base = OTHER; note = Nucleotide with phosphorothioate linkage
  modified_base 100: mod_base = OTHER; note = 2'-O-methyl modified nucleotide with phosphorothioate linkage
  modified_base 101: mod_base = OTHER; note = 2'-O-methyl modified nucleotide with phosphorothioate linkage
  modified_base 102: mod_base = OTHER; note = 2'-O-methyl modified nucleotide
  misc_difference 1..25: note = This region may encompass 20-25 nucleotides
nnnnnnnnnnnnnnnnnnnnnnnnngttgtagctccctgaaaccgttgctacaataaggccgtcgaaagatgtgccgcaacgctctgccttctggcatcgtt

SEQ ID NO: 250 - RNA, 101 nt, synthetic construct; identical to SEQ ID NO: 248
  source 1..101: mol_type = other RNA
  misc_difference 1: note = 2'-O-methyl modified adenosine, cytidine, uridine, guanosine, unknown or other nucleotide with phosphorothioate linkage
  misc_difference 2: note = 2'-O-methyl modified adenosine, cytidine, uridine, guanosine, unknown or other nucleotide with phosphorothioate linkage
  misc_difference 3: note = 2'-O-methyl modified adenosine, cytidine, uridine, guanosine, unknown or other nucleotide with phosphorothioate linkage
  misc_difference 4: note = 2'-O-methyl modified adenosine, cytidine, uridine, guanosine, unknown or other nucleotide
  misc_difference 5: note = 2'-O-methyl modified adenosine, cytidine, uridine, guanosine, unknown or other nucleotide
  misc_difference 6: note = a, c, u, g, unknown or other
  misc_difference 7: note = a, c, u, g, unknown or other
  misc_difference 8: note = 2'-O-methyl modified adenosine, cytidine, uridine, guanosine, unknown or other nucleotide
  misc_difference 9: note = 2'-O-methyl modified adenosine, cytidine, uridine, guanosine, unknown or other nucleotide
  misc_difference 10: note = a, c, u, g, unknown or other
  misc_difference 11: note = 2'-O-methyl modified adenosine, cytidine, uridine, guanosine, unknown or other nucleotide
  misc_difference 12: note = a, c, u, g, unknown or other
  misc_difference 13: note = 2'-O-methyl modified adenosine, cytidine, uridine, guanosine, unknown or other nucleotide
  misc_difference 14: note = a, c, u, g, unknown or other
  misc_difference 15: note = a, c, u, g, unknown or other
  misc_difference 16: note = a, c, u, g, unknown or other
  misc_difference 17: note = a, c, u, g, unknown or other
  misc_difference 18: note = 2'-O-methyl modified adenosine, cytidine, uridine, guanosine, unknown or other nucleotide
  misc_difference 19: note = a, c, u, g, unknown or other
  misc_difference 20: note = a, c, u, g, unknown or other
  misc_difference 21: note = a, c, u, g, unknown or other
  misc_difference 22: note = 2'-O-methyl modified adenosine, cytidine, uridine, guanosine, unknown or other nucleotide
  misc_difference 23: note = a, c, u, g, unknown or other
  misc_difference 24: note = a, c, u, g, unknown or other
  modified_base 25: mod_base = OTHER; note = 2'-O-methyl modified nucleotide
  modified_base 29: mod_base = OTHER; note = 2'-O-methyl modified nucleotide
  modified_base 30: mod_base = OTHER; note = 2'-O-methyl modified nucleotide
  modified_base 31: mod_base = OTHER; note = 2'-O-methyl modified nucleotide
  modified_base 32: mod_base = OTHER; note = 2'-O-methyl modified nucleotide
  modified_base 37: mod_base = OTHER; note = 2'-O-methyl modified nucleotide
  modified_base 38: mod_base = OTHER; note = 2'-O-methyl modified nucleotide
  modified_base 39: mod_base = OTHER; note = 2'-O-methyl modified nucleotide
  modified_base 40: mod_base = OTHER; note = 2'-O-methyl modified nucleotide
  modified_base 41: mod_base = OTHER; note = 2'-O-methyl modified nucleotide
  modified_base 42: mod_base = OTHER; note = 2'-O-methyl modified nucleotide
  modified_base 43: mod_base = OTHER; note = 2'-O-methyl modified nucleotide
  modified_base 47: mod_base = OTHER; note = 2'-O-methyl modified nucleotide
  modified_base 48: mod_base = OTHER; note = 2'-O-methyl modified nucleotide
  modified_base 51: mod_base = OTHER; note = 2'-O-methyl modified nucleotide
  modified_base 54: mod_base = OTHER; note = Nucleotide with phosphorothioate linkage
  modified_base 58: mod_base = OTHER; note = 2'-O-methyl modified nucleotide
  modified_base 59: mod_base = OTHER; note = 2'-O-methyl modified nucleotide
  modified_base 61: mod_base = OTHER; note = 2'-O-methyl modified nucleotide
  modified_base 62: mod_base = OTHER; note = 2'-O-methyl modified nucleotide
  modified_base 63: mod_base = OTHER; note = 2'-O-methyl modified nucleotide
  modified_base 64: mod_base = OTHER; note = 2'-O-methyl modified nucleotide
  modified_base 65: mod_base = OTHER; note = 2'-O-methyl modified nucleotide
  modified_base 66: mod_base = OTHER; note = 2'-O-methyl modified nucleotide
  modified_base 67: mod_base = OTHER; note = 2'-O-methyl modified nucleotide
  modified_base 68: mod_base = OTHER; note = 2'-O-methyl modified nucleotide
  modified_base 69: mod_base = OTHER; note = 2'-O-methyl modified nucleotide
  modified_base 70: mod_base = OTHER; note = 2'-O-methyl modified nucleotide
  modified_base 75: mod_base = OTHER; note = 2'-O-methyl modified nucleotide
  modified_base 77: mod_base = OTHER; note = 2'-O-methyl modified nucleotide
  modified_base 80: mod_base = OTHER; note = 2'-O-methyl modified nucleotide
  modified_base 86: mod_base = OTHER; note = 2'-O-methyl modified nucleotide
  modified_base 87: mod_base = OTHER; note = 2'-O-methyl modified nucleotide
  modified_base 89: mod_base = OTHER; note = 2'-O-methyl modified nucleotide
  modified_base 90: mod_base = OTHER; note = 2'-O-methyl modified nucleotide
  modified_base 91: mod_base = OTHER; note = 2'-O-methyl modified nucleotide
  modified_base 92: mod_base = OTHER; note = 2'-O-methyl modified nucleotide
  modified_base 99: mod_base = OTHER; note = Nucleotide with phosphorothioate linkage
  modified_base 100: mod_base = OTHER; note = 2'-O-methyl modified nucleotide with phosphorothioate linkage
  modified_base 101: mod_base = OTHER; note = 2'-O-methyl modified nucleotide

SEQ ID NO: 251 - RNA, 20 nt, synthetic construct
  source 1..20: mol_type = other RNA
ccaatatcaggagactagga

SEQ ID NO: 252 - RNA, 20 nt, synthetic construct
  source 1..20: mol_type = other RNA
ccatcgtaagcaaaccttag

SEQ ID NO: 253 - RNA, 20 nt, synthetic construct
  source 1..20: mol_type = other RNA
gcaaggagagagatggctcc

SEQ ID NO: 254 - RNA, 20 nt, synthetic construct
  source 1..20: mol_type = other RNA
gagagatggctccaggaaat

SEQ ID NO: 255 - RNA, 20 nt, synthetic construct
  source 1..20: mol_type = other RNA
ggtgacacacccccatttcc

SEQ ID NO: 256 - RNA, 20 nt, synthetic construct
  source 1..20: mol_type = other RNA
agacccaatatcaggagact

SEQ ID NO: 257 - RNA, 20 nt, synthetic construct
  source 1..20: mol_type = other RNA
tgtccctagtggccccactg

SEQ ID NO: 258 - RNA, 20 nt, synthetic construct
  source 1..20: mol_type = other RNA
ccggccctgggaatataagg

SEQ ID NO: 259 - RNA, 20 nt, synthetic construct
  source 1..20: mol_type = other RNA
aatataaggtggtcccagct

SEQ ID NO: 260 - RNA, 20 nt, synthetic construct
  source 1..20: mol_type = other RNA
atataaggtggtcccagctc

SEQ ID NO: 261 - RNA, 20 nt, synthetic construct
  source 1..20: mol_type = other RNA
tataaggtggtcccagctcg

SEQ ID NO: 262 - RNA, 20 nt, synthetic construct
  source 1..20: mol_type = other RNA
ggatcctgtgtccccgagct

SEQ ID NO: 263 - RNA, 20 nt, synthetic construct
  source 1..20: mol_type = other RNA
cctgtcatggcatcttccag

SEQ ID NO: 264 - RNA, 20 nt, synthetic construct
  source 1..20: mol_type = other RNA
ccctggaagatgccatgaca

SEQ ID NO: 265 - RNA, 100 nt, synthetic construct
  source 1..100: mol_type = other RNA
ccaatatcaggagactaggagttttagagctagaaatagcaagttaaaataaggctagtccgttatcaacttgaaaaagtggcaccgagtcggtgctttt

SEQ ID NO: 266 - RNA, 100 nt, synthetic construct
  source 1..100: mol_type = other RNA
ccatcgtaagcaaaccttaggttttagagctagaaatagcaagttaaaataaggctagtccgttatcaacttgaaaaagtggcaccgagtcggtgctttt

SEQ ID NO: 267 - RNA, 100 nt, synthetic construct
  source 1..100: mol_type = other RNA
gcaaggagagagatggctccgttttagagctagaaatagcaagttaaaataaggctagtccgttatcaacttgaaaaagtggcaccgagtcggtgctttt

SEQ ID NO: 268 - RNA, 100 nt, synthetic construct
  source 1..100: mol_type = other RNA
gagagatggctccaggaaatgttttagagctagaaatagcaagttaaaataaggctagtccgttatcaacttgaaaaagtggcaccgagtcggtgctttt

SEQ ID NO: 269 - RNA, 100 nt, synthetic construct
  source 1..100: mol_type = other RNA
ggtgacacacccccatttccgttttagagctagaaatagcaagttaaaataaggctagtccgttatcaacttgaaaaagtggcaccgagtcggtgctttt

SEQ ID NO: 270 - RNA, 100 nt, synthetic construct
  source 1..100: mol_type = other RNA
agacccaatatcaggagactgttttagagctagaaatagcaagttaaaataaggctagtccgttatcaacttgaaaaagtggcaccgagtcggtgctttt

SEQ ID NO: 271 - RNA, 100 nt, synthetic construct
  source 1..100: mol_type = other RNA
tgtccctagtggccccactggttttagagctagaaatagcaagttaaaataaggctagtccgttatcaacttgaaaaagtggcaccgagtcggtgctttt

SEQ ID NO: 272 - RNA, 100 nt, synthetic construct
  source 1..100: mol_type = other RNA
ccggccctgggaatataagggttttagagctagaaatagcaagttaaaataaggctagtccgttatcaacttgaaaaagtggcaccgagtcggtgctttt

SEQ ID NO: 273 - RNA, 100 nt, synthetic construct
  source 1..100: mol_type = other RNA
aatataaggtggtcccagctgttttagagctagaaatagcaagttaaaataaggctagtccgttatcaacttgaaaaagtggcaccgagtcggtgctttt

SEQ ID NO: 274 - RNA, 100 nt, synthetic construct
  source 1..100: mol_type = other RNA
atataaggtggtcccagctcgttttagagctagaaatagcaagttaaaataaggctagtccgttatcaacttgaaaaagtggcaccgagtcggtgctttt

SEQ ID NO: 275 - RNA, 100 nt, synthetic construct
  source 1..100: mol_type = other RNA
tataaggtggtcccagctcggttttagagctagaaatagcaagttaaaataaggctagtccgttatcaacttgaaaaagtggcaccgagtcggtgctttt

SEQ ID NO: 276 - RNA, 100 nt, synthetic construct
  source 1..100: mol_type = other RNA
ggatcctgtgtccccgagctgttttagagctagaaatagcaagttaaaataaggctagtccgttatcaacttgaaaaagtggcaccgagtcggtgctttt

SEQ ID NO: 277 - RNA, 100 nt, synthetic construct
  source 1..100: mol_type = other RNA
cctgtcatggcatcttccaggttttagagctagaaatagcaagttaaaataaggctagtccgttatcaacttgaaaaagtggcaccgagtcggtgctttt

SEQ ID NO: 278 - RNA, 100 nt, synthetic construct
  source 1..100: mol_type = other RNA
ccctggaagatgccatgacagttttagagctagaaatagcaagttaaaataaggctagtccgttatcaacttgaaaaagtggcaccgagtcggtgctttt

SEQ ID NO: 279 - RNA, 100 nt, synthetic construct; identical to SEQ ID NO: 265
  source 1..100: mol_type = other RNA
  modified_base 1: mod_base = OTHER; note = 2'-O-methyl modified nucleotide with phosphorothioate linkage
  modified_base 2: mod_base = OTHER; note = 2'-O-methyl modified nucleotide with phosphorothioate linkage
  modified_base 3: mod_base = OTHER; note = 2'-O-methyl modified nucleotide with phosphorothioate linkage
  modified_base 29: mod_base = OTHER; note = 2'-O-methyl modified nucleotide
  modified_base 30: mod_base = OTHER; note = 2'-O-methyl modified nucleotide
  modified_base 31: mod_base = OTHER; note = 2'-O-methyl modified nucleotide
  modified_base 32: mod_base = OTHER; note = 2'-O-methyl modified nucleotide
  modified_base 33: mod_base = OTHER; note = 2'-O-methyl modified nucleotide
  modified_base 34: mod_base = OTHER; note = 2'-O-methyl modified nucleotide
  modified_base 35: mod_base = OTHER; note = 2'-O-methyl modified nucleotide
  modified_base 36: mod_base = OTHER; note = 2'-O-methyl modified nucleotide
  modified_base 37: mod_base = OTHER; note = 2'-O-methyl modified nucleotide
  modified_base 38: mod_base = OTHER; note = 2'-O-methyl modified nucleotide
  modified_base 39: mod_base = OTHER; note = 2'-O-methyl modified nucleotide
  modified_base 40: mod_base = OTHER; note = 2'-O-methyl modified nucleotide
  modified_base 69: mod_base = OTHER; note = 2'-O-methyl modified nucleotide
  modified_base 70: mod_base = OTHER; note = 2'-O-methyl modified nucleotide
  modified_base 71: mod_base = OTHER; note = 2'-O-methyl modified nucleotide
  modified_base 72: mod_base = OTHER; note = 2'-O-methyl modified nucleotide
  modified_base 73: mod_base = OTHER; note = 2'-O-methyl modified nucleotide
  modified_base 74: mod_base = OTHER; note = 2'-O-methyl modified nucleotide
  modified_base 75: mod_base = OTHER; note = 2'-O-methyl modified nucleotide
  modified_base 76: mod_base = OTHER; note = 2'-O-methyl modified nucleotide
  modified_base 77: mod_base = OTHER; note = 2'-O-methyl modified nucleotide
  modified_base 78: mod_base = OTHER; note = 2'-O-methyl modified nucleotide
  modified_base 79: mod_base = OTHER; note = 2'-O-methyl modified nucleotide
  modified_base 80: mod_base = OTHER; note = 2'-O-methyl modified nucleotide
  modified_base 81: mod_base = OTHER; note = 2'-O-methyl modified nucleotide
  modified_base 82: mod_base = OTHER; note = 2'-O-methyl modified nucleotide
  modified_base 83: mod_base = OTHER; note = 2'-O-methyl modified nucleotide
  modified_base 84: mod_base = OTHER; note = 2'-O-methyl modified nucleotide
  modified_base 85: mod_base = OTHER; note = 2'-O-methyl modified nucleotide
  modified_base 86: mod_base = OTHER; note = 2'-O-methyl modified nucleotide
  modified_base 87: mod_base = OTHER; note = 2'-O-methyl modified nucleotide
  modified_base 88: mod_base = OTHER; note = 2'-O-methyl modified nucleotide
  modified_base 89: mod_base = OTHER; note = 2'-O-methyl modified nucleotide
  modified_base 90: mod_base = OTHER; note = 2'-O-methyl modified nucleotide
  modified_base 91: mod_base = OTHER; note = 2'-O-methyl modified nucleotide
  modified_base 92: mod_base = OTHER; note = 2'-O-methyl modified nucleotide
  modified_base 93: mod_base = OTHER; note = 2'-O-methyl modified nucleotide
  modified_base 94: mod_base = OTHER; note = 2'-O-methyl modified nucleotide
  modified_base 95: mod_base = OTHER; note = 2'-O-methyl modified nucleotide
  modified_base 96: mod_base = OTHER; note = 2'-O-methyl modified nucleotide
  modified_base 97: mod_base = OTHER; note = 2'-O-methyl modified nucleotide with phosphorothioate linkage
  modified_base 98: mod_base = OTHER; note = 2'-O-methyl modified nucleotide with phosphorothioate linkage
  modified_base 99: mod_base = OTHER; note = 2'-O-methyl modified nucleotide with phosphorothioate linkage
  modified_base 100: mod_base = OTHER; note = 2'-O-methyl modified nucleotide

SEQ ID NO: 280 - RNA, 100 nt, synthetic construct; identical to SEQ ID NO: 266
  source 1..100: mol_type = other RNA
  modified_base 1: mod_base = OTHER; note = 2'-O-methyl modified nucleotide with phosphorothioate linkage
  modified_base 2: mod_base = OTHER; note = 2'-O-methyl modified nucleotide with phosphorothioate linkage
  modified_base 3: mod_base = OTHER; note = 2'-O-methyl modified nucleotide with phosphorothioate linkage
  modified_base 29: mod_base = OTHER; note = 2'-O-methyl modified nucleotide
  modified_base 30: mod_base = OTHER; note = 2'-O-methyl modified nucleotide
  modified_base 31: mod_base = OTHER; note = 2'-O-methyl modified nucleotide
  modified_base 32: mod_base = OTHER; note = 2'-O-methyl modified nucleotide
  modified_base 33: mod_base = OTHER; note = 2'-O-methyl modified nucleotide
  modified_base 34: mod_base = OTHER; note = 2'-O-methyl modified nucleotide
  modified_base 35: mod_base = OTHER; note = 2'-O-methyl modified nucleotide
  modified_base 36: mod_base = OTHER; note = 2'-O-methyl modified nucleotide
  modified_base 37: mod_base = OTHER; note = 2'-O-methyl modified nucleotide
  modified_base 38: mod_base = OTHER; note = 2'-O-methyl modified nucleotide
  modified_base 39: mod_base = OTHER; note = 2'-O-methyl modified nucleotide
  modified_base 40: mod_base = OTHER; note = 2'-O-methyl modified nucleotide
  modified_base 69: mod_base = OTHER; note = 2'-O-methyl modified nucleotide
  modified_base 70: mod_base = OTHER; note = 2'-O-methyl modified nucleotide
  modified_base 71: mod_base = OTHER; note = 2'-O-methyl modified nucleotide
  modified_base 72: mod_base = OTHER; note = 2'-O-methyl modified nucleotide
  modified_base 73: mod_base = OTHER; note = 2'-O-methyl modified nucleotide
  modified_base 74: mod_base = OTHER; note = 2'-O-methyl modified nucleotide
  modified_base 75: mod_base = OTHER; note = 2'-O-methyl modified nucleotide
  modified_base 76: mod_base = OTHER; note = 2'-O-methyl modified nucleotide
  modified_base 77: mod_base = OTHER; note = 2'-O-methyl modified nucleotide
  modified_base 78: mod_base = OTHER; note = 2'-O-methyl modified nucleotide
  modified_base 79: mod_base = OTHER; note = 2'-O-methyl modified nucleotide
  modified_base 80: mod_base = OTHER; note = 2'-O-methyl modified nucleotide
  modified_base 81: mod_base = OTHER; note = 2'-O-methyl modified nucleotide
  modified_base 82: mod_base = OTHER; note = 2'-O-methyl modified nucleotide
  modified_base 83: mod_base = OTHER; note = 2'-O-methyl modified nucleotide
  modified_base 84: mod_base = OTHER; note = 2'-O-methyl modified nucleotide
  modified_base 85: mod_base = OTHER; note = 2'-O-methyl modified nucleotide
  modified_base 86: mod_base = OTHER; note = 2'-O-methyl modified nucleotide
  modified_base 87: mod_base = OTHER; note = 2'-O-methyl modified nucleotide
  modified_base 88: mod_base = OTHER; note = 2'-O-methyl modified nucleotide
  modified_base 89: mod_base = OTHER; note = 2'-O-methyl modified nucleotide
  modified_base 90: mod_base = OTHER; note = 2'-O-methyl modified nucleotide
  modified_base 91: mod_base = OTHER; note = 2'-O-methyl modified nucleotide
  modified_base 92: mod_base = OTHER; note = 2'-O-methyl modified nucleotide
  modified_base 93: mod_base = OTHER; note = 2'-O-methyl modified nucleotide
  modified_base 94: mod_base = OTHER; note = 2'-O-methyl modified nucleotide
  modified_base 95: mod_base = OTHER; note = 2'-O-methyl modified nucleotide
  modified_base 96: mod_base = OTHER; note = 2'-O-methyl modified nucleotide
  modified_base 97: mod_base = OTHER; note = 2'-O-methyl modified nucleotide with phosphorothioate linkage
  modified_base 98: mod_base = OTHER; note = 2'-O-methyl modified nucleotide with phosphorothioate linkage
  modified_base 99: mod_base = OTHER; note = 2'-O-methyl modified nucleotide with phosphorothioate linkage
  modified_base 100: mod_base = OTHER; note = 2'-O-methyl modified nucleotide

SEQ ID NO: 281 - RNA, 100 nt, synthetic construct; identical to SEQ ID NO: 267
  source 1..100: mol_type = other RNA
  modified_base 1: mod_base = OTHER; note = 2'-O-methyl modified nucleotide with phosphorothioate linkage
  modified_base 2: mod_base = OTHER; note = 2'-O-methyl modified nucleotide with phosphorothioate linkage
  modified_base 3: mod_base = OTHER; note = 2'-O-methyl modified nucleotide with phosphorothioate linkage
  modified_base 29: mod_base = OTHER; note = 2'-O-methyl modified nucleotide
  modified_base 30: mod_base = OTHER; note = 2'-O-methyl modified nucleotide
  modified_base 31: mod_base = OTHER; note = 2'-O-methyl modified nucleotide
  modified_base 32: mod_base = OTHER; note = 2'-O-methyl modified nucleotide
  modified_base 33: mod_base = OTHER; note = 2'-O-methyl modified nucleotide
  modified_base 34: mod_base = OTHER; note = 2'-O-methyl modified nucleotide
  modified_base 35: mod_base = OTHER; note = 2'-O-methyl modified nucleotide
  modified_base 36: mod_base = OTHER; note = 2'-O-methyl modified nucleotide
  modified_base 37: mod_base = OTHER; note = 2'-O-methyl modified nucleotide
  modified_base 38: mod_base = OTHER; note = 2'-O-methyl modified nucleotide
  modified_base 39: mod_base = OTHER; note = 2'-O-methyl modified nucleotide
  modified_base 40: mod_base = OTHER; note = 2'-O-methyl modified nucleotide
  modified_base 69: mod_base = OTHER; note = 2'-O-methyl modified nucleotide
  modified_base 70: mod_base = OTHER; note = 2'-O-methyl modified nucleotide
  modified_base 71: mod_base = OTHER; note = 2'-O-methyl modified nucleotide
  modified_base 72: mod_base = OTHER; note = 2'-O-methyl modified nucleotide
  modified_base 73: mod_base = OTHER; note = 2'-O-methyl modified nucleotide
  modified_base 74: mod_base = OTHER; note = 2'-O-methyl modified nucleotide
  modified_base 75: mod_base = OTHER; note = 2'-O-methyl modified nucleotide
  modified_base 76: mod_base = OTHER; note = 2'-O-methyl modified nucleotide
  modified_base 77: mod_base = OTHER; note = 2'-O-methyl modified nucleotide
  modified_base 78: mod_base = OTHER; note = 2'-O-methyl modified nucleotide
  modified_base 79: mod_base = OTHER; note = 2'-O-methyl modified nucleotide
  modified_base 80: mod_base = OTHER; note = 2'-O-methyl modified nucleotide
  modified_base 81: mod_base = OTHER; note = 2'-O-methyl modified nucleotide
  modified_base 82: mod_base = OTHER; note = 2'-O-methyl modified nucleotide
  modified_base 83: mod_base = OTHER; note = 2'-O-methyl modified nucleotide
  modified_base 84: mod_base = OTHER; note = 2'-O-methyl modified nucleotide
  modified_base 85: mod_base = OTHER; note = 2'-O-methyl modified nucleotide
  modified_base 86: mod_base = OTHER; note = 2'-O-methyl modified nucleotide
  modified_base 87: mod_base = OTHER; note = 2'-O-methyl modified nucleotide
  modified_base 88: mod_base = OTHER; note = 2'-O-methyl modified nucleotide
  modified_base 89: mod_base = OTHER; note = 2'-O-methyl modified nucleotide
  modified_base 90: mod_base = OTHER; note = 2'-O-methyl modified nucleotide
  modified_base 91: mod_base = OTHER; note = 2'-O-methyl modified nucleotide
  modified_base 92: mod_base = OTHER; note = 2'-O-methyl modified nucleotide
  modified_base 93: mod_base = OTHER; note = 2'-O-methyl modified nucleotide
  modified_base 94: mod_base = OTHER; note = 2'-O-methyl modified nucleotide
  modified_base 95: mod_base = OTHER; note = 2'-O-methyl modified nucleotide
  modified_base 96: mod_base = OTHER; note = 2'-O-methyl modified nucleotide
  modified_base 97: mod_base = OTHER; note = 2'-O-methyl modified nucleotide with phosphorothioate linkage
  modified_base 98: mod_base = OTHER; note = 2'-O-methyl modified nucleotide with phosphorothioate linkage
  modified_base 99: mod_base = OTHER; note = 2'-O-methyl modified nucleotide with phosphorothioate linkage
  modified_base 100: mod_base = OTHER; note = 2'-O-methyl modified nucleotide

SEQ ID NO: 282 - RNA, 100 nt, synthetic construct; identical to SEQ ID NO: 268
  source 1..100: mol_type = other RNA
  modified_base 1: mod_base = OTHER; note = 2'-O-methyl modified nucleotide with phosphorothioate linkage
  modified_base 2: mod_base = OTHER; note = 2'-O-methyl modified nucleotide with phosphorothioate linkage
  modified_base 3: mod_base = OTHER; note = 2'-O-methyl modified nucleotide with phosphorothioate linkage
  modified_base 29: mod_base = OTHER; note = 2'-O-methyl modified nucleotide
  modified_base 30: mod_base = OTHER; note = 2'-O-methyl modified nucleotide
  modified_base 31: mod_base = OTHER; note = 2'-O-methyl modified nucleotide
  modified_base 32: mod_base = OTHER; note = 2'-O-methyl modified nucleotide
  modified_base 33: mod_base = OTHER; note = 2'-O-methyl modified nucleotide
  modified_base 34: mod_base = OTHER; note = 2'-O-methyl modified nucleotide
  modified_base 35: mod_base = OTHER; note = 2'-O-methyl modified nucleotide
  modified_base 36: mod_base = OTHER; note = 2'-O-methyl modified nucleotide
  modified_base 37: mod_base = OTHER; note = 2'-O-methyl modified nucleotide
  modified_base 38: mod_base = OTHER; note = 2'-O-methyl modified nucleotide
  modified_base 39: mod_base = OTHER; note = 2'-O-methyl modified nucleotide
  modified_base 40: mod_base = OTHER; note = 2'-O-methyl modified nucleotide
  modified_base 69: mod_base = OTHER; note = 2'-O-methyl modified nucleotide
  modified_base 70: mod_base = OTHER; note = 2'-O-methyl modified nucleotide
  modified_base 71: mod_base = OTHER; note = 2'-O-methyl modified nucleotide
  modified_base 72: mod_base = OTHER; note = 2'-O-methyl modified nucleotide
  modified_base 73: mod_base = OTHER; note = 2'-O-methyl modified nucleotide
  modified_base 74: mod_base = OTHER; note = 2'-O-methyl modified nucleotide
  modified_base 75: mod_base = OTHER; note = 2'-O-methyl modified nucleotide
  modified_base 76: mod_base = OTHER; note = 2'-O-methyl modified nucleotide
  modified_base 77: mod_base = OTHER; note = 2'-O-methyl modified nucleotide
  modified_base 78: mod_base = OTHER; note = 2'-O-methyl modified nucleotide
  modified_base 79: mod_base = OTHER; note = 2'-O-methyl modified nucleotide
  modified_base 80: mod_base = OTHER; note = 2'-O-methyl modified nucleotide
  modified_base 81: mod_base = OTHER; note = 2'-O-methyl modified nucleotide
  modified_base 82: mod_base = OTHER; note = 2'-O-methyl modified nucleotide
  modified_base 83: mod_base = OTHER; note = 2'-O-methyl modified nucleotide
  modified_base 84: mod_base = OTHER; note = 2'-O-methyl modified nucleotide
  modified_base 85: mod_base = OTHER; note = 2'-O-methyl modified nucleotide
  modified_base 86: mod_base = OTHER; note = 2'-O-methyl modified nucleotide
  modified_base 87: mod_base = OTHER; note = 2'-O-methyl modified nucleotide
  modified_base 88: mod_base = OTHER; note = 2'-O-methyl modified nucleotide
  modified_base 89: mod_base = OTHER; note = 2'-O-methyl modified nucleotide
  modified_base 90: mod_base = OTHER; note = 2'-O-methyl modified nucleotide
  modified_base 91: mod_base = OTHER; note = 2'-O-methyl modified nucleotide
  modified_base 92: mod_base = OTHER; note = 2'-O-methyl modified nucleotide
  modified_base 93: mod_base = OTHER; note = 2'-O-methyl modified nucleotide
  modified_base 94: mod_base = OTHER; note = 2'-O-methyl modified nucleotide
  modified_base 95: mod_base = OTHER; note = 2'-O-methyl modified nucleotide
  modified_base 96: mod_base = OTHER; note = 2'-O-methyl modified nucleotide
  modified_base 97: mod_base = OTHER; note = 2'-O-methyl modified nucleotide with phosphorothioate linkage
  modified_base 98: mod_base = OTHER; note = 2'-O-methyl modified nucleotide with phosphorothioate linkage
  modified_base 99: mod_base = OTHER; note = 2'-O-methyl modified nucleotide with phosphorothioate linkage
  modified_base 100: mod_base = OTHER; note = 2'-O-methyl modified nucleotide

SEQ ID NO: 283 - RNA, 100 nt, synthetic construct; identical to SEQ ID NO: 269
  source 1..100: mol_type = other RNA
  modified_base 1: mod_base = OTHER; note = 2'-O-methyl modified nucleotide with phosphorothioate linkage
  modified_base 2: mod_base = OTHER; note = 2'-O-methyl modified nucleotide with phosphorothioate linkage
  modified_base 3: mod_base = OTHER; note = 2'-O-methyl modified nucleotide with phosphorothioate linkage
  modified_base 29: mod_base = OTHER; note = 2'-O-methyl modified nucleotide
  modified_base 30: mod_base = OTHER; note = 2'-O-methyl modified nucleotide
  modified_base 31: mod_base = OTHER; note = 2'-O-methyl modified nucleotide
  modified_base 32: mod_base = OTHER; note = 2'-O-methyl modified nucleotide
  modified_base 33: mod_base = OTHER; note = 2'-O-methyl modified nucleotide
  modified_base 34: mod_base = OTHER; note = 2'-O-methyl modified nucleotide
  modified_base 35: mod_base = OTHER; note = 2'-O-methyl modified nucleotide
  modified_base 36: mod_base = OTHER; note = 2'-O-methyl modified nucleotide
  modified_base 37: mod_base = OTHER; note = 2'-O-methyl modified nucleotide
  modified_base 38: mod_base = OTHER; note = 2'-O-methyl modified nucleotide
  modified_base 39: mod_base = OTHER; note = 2'-O-methyl modified nucleotide
  modified_base 40: mod_base = OTHER; note = 2'-O-methyl modified nucleotide
  modified_base 69: mod_base = OTHER; note = 2'-O-methyl modified nucleotide
  modified_base 70: mod_base = OTHER; note = 2'-O-methyl modified nucleotide
  modified_base 71: mod_base = OTHER; note = 2'-O-methyl modified nucleotide
  modified_base 72: mod_base = OTHER; note = 2'-O-methyl modified nucleotide
  modified_base 73: mod_base = OTHER; note = 2'-O-methyl modified nucleotide
  modified_base 74: mod_base = OTHER; note = 2'-O-methyl modified nucleotide
  modified_base 75: mod_base = OTHER; note = 2'-O-methyl modified nucleotide
  modified_base 76: mod_base = OTHER; note = 2'-O-methyl modified nucleotide
  modified_base 77: mod_base = OTHER; note = 2'-O-methyl modified nucleotide
  modified_base 78: mod_base = OTHER; note = 2'-O-methyl modified nucleotide
  modified_base 79: mod_base = OTHER; note = 2'-O-methyl modified nucleotide
  modified_base 80: mod_base = OTHER; note = 2'-O-methyl modified nucleotide
  modified_base 81: mod_base = OTHER; note = 2'-O-methyl modified nucleotide
  modified_base 82: mod_base = OTHER; note = 2'-O-methyl modified nucleotide
  modified_base 83: mod_base = OTHER; note = 2'-O-methyl modified nucleotide
  modified_base 84: mod_base = OTHER; note = 2'-O-methyl modified nucleotide
  modified_base 85: mod_base = OTHER; note = 2'-O-methyl modified nucleotide
  modified_base 86: mod_base = OTHER; note = 2'-O-methyl modified nucleotide
  modified_base 87: mod_base = OTHER; note = 2'-O-methyl modified nucleotide
  modified_base 88: mod_base = OTHER; note = 2'-O-methyl modified nucleotide
  modified_base 89: mod_base = OTHER; note = 2'-O-methyl modified nucleotide
  modified_base 90: mod_base = OTHER; note = 2'-O-methyl modified nucleotide
  modified_base 91: mod_base = OTHER; note = 2'-O-methyl modified nucleotide
  modified_base 92: mod_base = OTHER; note = 2'-O-methyl modified nucleotide
  modified_base 93: mod_base = OTHER; note = 2'-O-methyl modified nucleotide
  modified_base 94: mod_base = OTHER; note = 2'-O-methyl modified nucleotide
  modified_base 95: mod_base = OTHER; note = 2'-O-methyl modified nucleotide
  modified_base 96: mod_base = OTHER; note = 2'-O-methyl modified nucleotide
  modified_base 97: mod_base = OTHER; note = 2'-O-methyl modified nucleotide with phosphorothioate linkage
  modified_base 98: mod_base = OTHER; note = 2'-O-methyl modified nucleotide with phosphorothioate linkage
  modified_base 99: mod_base = OTHER; note = 2'-O-methyl modified nucleotide with phosphorothioate linkage
  modified_base 100: mod_base = OTHER; note = 2'-O-methyl modified nucleotide

SEQ ID NO: 284 - RNA, 100 nt, synthetic construct; identical to SEQ ID NO: 270
  source 1..100: mol_type = other RNA
  modified_base 1: mod_base = OTHER; note = 2'-O-methyl modified nucleotide with phosphorothioate linkage
  modified_base 2: mod_base = OTHER; note = 2'-O-methyl modified nucleotide with phosphorothioate linkage
  modified_base 3: mod_base = OTHER; note = 2'-O-methyl modified nucleotide with phosphorothioate linkage
  modified_base 29: mod_base = OTHER; note = 2'-O-methyl modified nucleotide
  modified_base 30: mod_base = OTHER; note = 2'-O-methyl modified nucleotide
  modified_base 31: mod_base = OTHER; note = 2'-O-methyl modified nucleotide
  modified_base 32: mod_base = OTHER; note = 2'-O-methyl modified nucleotide
  modified_base 33: mod_base = OTHER; note = 2'-O-methyl modified nucleotide
  modified_base 34: mod_base = OTHER; note = 2'-O-methyl modified nucleotide
  modified_base 35: mod_base = OTHER; note = 2'-O-methyl modified nucleotide
  modified_base 36: mod_base = OTHER; note = 2'-O-methyl modified nucleotide
  modified_base 37: mod_base = OTHER; note = 2'-O-methyl modified nucleotide
  modified_base 38: mod_base = OTHER; note = 2'-O-methyl modified nucleotide
  modified_base 39: mod_base = OTHER; note = 2'-O-methyl modified nucleotide
  modified_base 40: mod_base = OTHER; note = 2'-O-methyl modified nucleotide
  modified_base 69: mod_base = OTHER; note = 2'-O-methyl modified nucleotide
  modified_base 70: mod_base = OTHER; note = 2'-O-methyl modified nucleotide
  modified_base 71: mod_base = OTHER; note = 2'-O-methyl modified nucleotide
  modified_base 72: mod_base = OTHER; note = 2'-O-methyl modified nucleotide
  modified_base 73: mod_base = OTHER; note = 2'-O-methyl modified nucleotide
  modified_base 74: mod_base = OTHER; note = 2'-O-methyl modified nucleotide
  modified_base 75: mod_base = OTHER; note = 2'-O-methyl modified nucleotide
  modified_base 76: mod_base = OTHER; note = 2'-O-methyl modified nucleotide
  modified_base 77: mod_base = OTHER; note = 2'-O-methyl modified nucleotide
  modified_base 78: mod_base = OTHER; note = 2'-O-methyl modified nucleotide
  modified_base 79: mod_base = OTHER; note = 2'-O-methyl modified nucleotide
  modified_base 80: mod_base = OTHER; note = 2'-O-methyl modified nucleotide
  modified_base 81: mod_base = OTHER; note = 2'-O-methyl modified nucleotide
  modified_base 82: mod_base = OTHER; note = 2'-O-methyl modified nucleotide
  modified_base 83: mod_base = OTHER; note = 2'-O-methyl modified nucleotide
  modified_base 84: mod_base = OTHER; note = 2'-O-methyl modified nucleotide
  modified_base 85: mod_base = OTHER; note = 2'-O-methyl modified nucleotide
  modified_base 86: mod_base = OTHER; note = 2'-O-methyl modified nucleotide
  modified_base 87: mod_base = OTHER; note = 2'-O-methyl modified nucleotide
  modified_base 88: mod_base = OTHER; note = 2'-O-methyl modified nucleotide
  modified_base 89: mod_base = OTHER; note = 2'-O-methyl modified nucleotide
  modified_base 90: mod_base = OTHER; note = 2'-O-methyl modified nucleotide
  modified_base 91: mod_base = OTHER; note = 2'-O-methyl modified nucleotide
  modified_base 92: mod_base = OTHER; note = 2'-O-methyl modified nucleotide
  modified_base 93: mod_base = OTHER; note = 2'-O-methyl modified nucleotide
  modified_base 94: mod_base = OTHER; note = 2'-O-methyl modified nucleotide
  modified_base 95: mod_base = OTHER; note = 2'-O-methyl modified nucleotide
  modified_base 96: mod_base = OTHER; note = 2'-O-methyl modified nucleotide
  modified_base 97: mod_base = OTHER; note = 2'-O-methyl modified nucleotide with phosphorothioate linkage
  modified_base 98: mod_base = OTHER; note = 2'-O-methyl modified nucleotide with phosphorothioate linkage
  modified_base 99: mod_base = OTHER; note = 2'-O-methyl modified nucleotide with phosphorothioate linkage
  modified_base 100: mod_base = OTHER; note = 2'-O-methyl modified nucleotide

SEQ ID NO: 285 - RNA, 100 nt, synthetic construct; identical to SEQ ID NO: 271
  source 1..100: mol_type = other RNA
  modified_base 1: mod_base = OTHER; note = 2'-O-methyl modified nucleotide with phosphorothioate linkage
  modified_base 2: mod_base = OTHER; note = 2'-O-methyl modified nucleotide with phosphorothioate linkage
  modified_base 3: mod_base = OTHER; note = 2'-O-methyl modified nucleotide with phosphorothioate linkage
  modified_base 29: mod_base = OTHER; note = 2'-O-methyl modified nucleotide
  modified_base 30: mod_base = OTHER; note = 2'-O-methyl modified nucleotide
  modified_base 31: mod_base = OTHER; note = 2'-O-methyl modified nucleotide
  modified_base 32: mod_base = OTHER; note = 2'-O-methyl modified nucleotide
  modified_base 33: mod_base = OTHER; note = 2'-O-methyl modified nucleotide
  modified_base 34: mod_base = OTHER; note = 2'-O-methyl modified nucleotide
  modified_base 35: mod_base = OTHER; note = 2'-O-methyl modified nucleotide
  modified_base 36: mod_base = OTHER; note = 2'-O-methyl modified nucleotide
  modified_base 37: mod_base = OTHER; note = 2'-O-methyl modified nucleotide
  modified_base 38: mod_base = OTHER; note = 2'-O-methyl modified nucleotide
  modified_base 39: mod_base = OTHER; note = 2'-O-methyl modified nucleotide
  modified_base 40: mod_base = OTHER; note = 2'-O-methyl modified nucleotide
  modified_base 69: mod_base = OTHER; note = 2'-O-methyl modified nucleotide
  modified_base 70: mod_base = OTHER; note = 2'-O-methyl modified nucleotide
  modified_base 71: mod_base = OTHER; note = 2'-O-methyl modified nucleotide
  modified_base 72: mod_base = OTHER; note = 2'-O-methyl modified nucleotide
  modified_base 73: mod_base = OTHER; note = 2'-O-methyl modified nucleotide
  modified_base 74: mod_base = OTHER; note = 2'-O-methyl modified nucleotide
  modified_base 75: mod_base = OTHER; note = 2'-O-methyl modified nucleotide
  modified_base 76: mod_base = OTHER; note = 2'-O-methyl modified nucleotide
  modified_base 77: mod_base = OTHER; note = 2'-O-methyl modified nucleotide
  modified_base 78: mod_base = OTHER; note = 2'-O-methyl modified nucleotide
  modified_base 79: mod_base = OTHER; note = 2'-O-methyl modified nucleotide
  modified_base 80: mod_base = OTHER; note = 2'-O-methyl modified nucleotide
  modified_base 81: mod_base = OTHER; note = 2'-O-methyl modified nucleotide
  modified_base 82: mod_base = OTHER; note = 2'-O-methyl modified nucleotide
  modified_base 83: mod_base = OTHER; note = 2'-O-methyl modified nucleotide
  modified_base 84: mod_base = OTHER; note = 2'-O-methyl modified nucleotide
  modified_base 85: mod_base = OTHER; note = 2'-O-methyl modified nucleotide
  modified_base 86: mod_base = OTHER; note = 2'-O-methyl modified nucleotide
  modified_base 87: mod_base = OTHER; note = 2'-O-methyl modified nucleotide
  modified_base 88: mod_base = OTHER; note = 2'-O-methyl modified nucleotide
  modified_base 89: mod_base = OTHER; note = 2'-O-methyl modified nucleotide
  modified_base 90: mod_base = OTHER; note = 2'-O-methyl modified nucleotide
  modified_base 91: mod_base = OTHER; note = 2'-O-methyl modified nucleotide
  modified_base 92: mod_base = OTHER; note = 2'-O-methyl modified nucleotide
  modified_base 93: mod_base = OTHER; note = 2'-O-methyl modified nucleotide
  modified_base 94: mod_base = OTHER; note = 2'-O-methyl modified nucleotide
  modified_base 95: mod_base = OTHER; note = 2'-O-methyl modified nucleotide
  modified_base 96: mod_base = OTHER; note = 2'-O-methyl modified nucleotide
  modified_base 97: mod_base = OTHER; note = 2'-O-methyl modified nucleotide with phosphorothioate linkage
  modified_base 98: mod_base = OTHER; note = 2'-O-methyl modified nucleotide with phosphorothioate linkage
  modified_base 99: mod_base = OTHER; note = 2'-O-methyl modified nucleotide with phosphorothioate linkage
  modified_base 100: mod_base = OTHER; note = 2'-O-methyl modified nucleotide

SEQ ID NO: 286 - RNA, 100 nt, synthetic construct; identical to SEQ ID NO: 272
  source 1..100: mol_type = other RNA
  modified_base 1: mod_base = OTHER; note = 2'-O-methyl modified nucleotide with phosphorothioate linkage
  modified_base 2: mod_base = OTHER; note = 2'-O-methyl modified nucleotide with phosphorothioate linkage
  modified_base 3: mod_base = OTHER; note = 2'-O-methyl modified nucleotide with phosphorothioate linkage
  modified_base 29: mod_base = OTHER; note = 2'-O-methyl modified nucleotide
  modified_base 30: mod_base = OTHER; note = 2'-O-methyl modified nucleotide
  modified_base 31: mod_base = OTHER; note = 2'-O-methyl modified nucleotide
  modified_base 32: mod_base = OTHER; note = 2'-O-methyl modified nucleotide
  modified_base 33: mod_base = OTHER; note = 2'-O-methyl modified nucleotide
  modified_base 34: mod_base = OTHER; note = 2'-O-methyl modified nucleotide
  modified_base 35: mod_base = OTHER; note = 2'-O-methyl modified nucleotide
  modified_base 36: mod_base = OTHER; note = 2'-O-methyl modified nucleotide
  modified_base 37: mod_base = OTHER; note = 2'-O-methyl modified nucleotide
  modified_base 38: mod_base = OTHER; note = 2'-O-methyl modified nucleotide
  modified_base 39: mod_base = OTHER; note = 2'-O-methyl modified nucleotide
  modified_base 40: mod_base = OTHER; note = 2'-O-methyl modified nucleotide
  modified_base 69: mod_base = OTHER; note = 2'-O-methyl modified nucleotide
  modified_base 70: mod_base = OTHER; note = 2'-O-methyl modified nucleotide
  modified_base 71: mod_base = OTHER; note = 2'-O-methyl modified nucleotide
  modified_base 72: mod_base = OTHER; note = 2'-O-methyl modified nucleotide
  modified_base 73: mod_base = OTHER; note = 2'-O-methyl modified nucleotide
  modified_base 74: mod_base = OTHER; note = 2'-O-methyl modified nucleotide
  modified_base 75: mod_base = OTHER; note = 2'-O-methyl modified nucleotide
  modified_base 76: mod_base = OTHER; note = 2'-O-methyl modified nucleotide
  modified_base 77: mod_base = OTHER; note = 2'-O-methyl modified nucleotide
  modified_base 78: mod_base = OTHER; note = 2'-O-methyl modified nucleotide
  modified_base 79: mod_base = OTHER; note = 2'-O-methyl modified nucleotide
  modified_base 80: mod_base = OTHER; note = 2'-O-methyl modified nucleotide
  modified_base 81: mod_base = OTHER; note = 2'-O-methyl modified nucleotide
  modified_base 82: mod_base = OTHER; note = 2'-O-methyl modified nucleotide
  modified_base 83: mod_base = OTHER; note = 2'-O-methyl modified nucleotide
  modified_base 84: mod_base = OTHER; note = 2'-O-methyl modified nucleotide
  modified_base 85: mod_base = OTHER; note = 2'-O-methyl modified nucleotide
  modified_base 86: mod_base = OTHER; note = 2'-O-methyl modified nucleotide
  modified_base 87: mod_base = OTHER; note = 2'-O-methyl modified nucleotide
  modified_base 88: mod_base = OTHER; note = 2'-O-methyl modified nucleotide
  modified_base 89: mod_base = OTHER; note = 2'-O-methyl modified nucleotide
  modified_base 90: mod_base = OTHER; note = 2'-O-methyl modified nucleotide
  modified_base 91: mod_base = OTHER; note = 2'-O-methyl modified nucleotide
  modified_base 92: mod_base = OTHER; note = 2'-O-methyl modified nucleotide
  modified_base 93: mod_base = OTHER; note = 2'-O-methyl modified nucleotide
  modified_base 94: mod_base = OTHER; note = 2'-O-methyl modified nucleotide
  modified_base 95: mod_base = OTHER; note = 2'-O-methyl modified nucleotide
  modified_base 96: mod_base = OTHER; note = 2'-O-methyl modified nucleotide
  modified_base 97: mod_base = OTHER; note = 2'-O-methyl modified nucleotide with phosphorothioate linkage
  modified_base 98: mod_base = OTHER; note = 2'-O-methyl modified nucleotide with phosphorothioate linkage
  modified_base 99: mod_base = OTHER; note = 2'-O-methyl modified nucleotide with phosphorothioate linkage
  modified_base 100: mod_base = OTHER; note = 2'-O-methyl modified nucleotide

SEQ ID NO: 287 - RNA, 100 nt, synthetic construct; identical to SEQ ID NO: 273
  source 1..100: mol_type = other RNA
  modified_base 1: mod_base = OTHER; note = 2'-O-methyl modified nucleotide with phosphorothioate linkage
  modified_base 2: mod_base = OTHER; note = 2'-O-methyl modified nucleotide with phosphorothioate linkage
  modified_base 3: mod_base = OTHER; note = 2'-O-methyl modified nucleotide with phosphorothioate linkage
  modified_base 29: mod_base = OTHER; note = 2'-O-methyl modified nucleotide
  modified_base 30: mod_base = OTHER; note = 2'-O-methyl modified nucleotide
  modified_base 31: mod_base = OTHER; note = 2'-O-methyl modified nucleotide
  modified_base 32: mod_base = OTHER; note = 2'-O-methyl modified nucleotide
  modified_base 33: mod_base = OTHER; note = 2'-O-methyl modified nucleotide
  modified_base 34: mod_base = OTHER; note = 2'-O-methyl modified nucleotide
  modified_base 35: mod_base = OTHER; note = 2'-O-methyl modified nucleotide
  modified_base 36: mod_base = OTHER; note = 2'-O-methyl modified nucleotide
  modified_base 37: mod_base = OTHER; note = 2'-O-methyl modified nucleotide
  modified_base 38: mod_base = OTHER; note = 2'-O-methyl modified nucleotide
  modified_base 39: mod_base = OTHER; note = 2'-O-methyl modified nucleotide
  modified_base 40: mod_base = OTHER; note = 2'-O-methyl modified nucleotide
  modified_base 69: mod_base = OTHER; note = 2'-O-methyl modified nucleotide
  modified_base 70: mod_base = OTHER; note = 2'-O-methyl modified nucleotide
  modified_base 71: mod_base = OTHER; note = 2'-O-methyl modified nucleotide
  modified_base 72: mod_base = OTHER; note = 2'-O-methyl modified nucleotide
  modified_base 73: mod_base = OTHER; note = 2'-O-methyl modified nucleotide
  modified_base 74: mod_base = OTHER; note = 2'-O-methyl modified nucleotide
  modified_base 75: mod_base = OTHER; note = 2'-O-methyl modified nucleotide
  modified_base 76: mod_base = OTHER; note = 2'-O-methyl modified nucleotide
  modified_base 77: mod_base = OTHER; note = 2'-O-methyl modified nucleotide
  modified_base 78: mod_base = OTHER; note = 2'-O-methyl modified nucleotide
  modified_base 79: mod_base = OTHER; note = 2'-O-methyl modified nucleotide
  modified_base 80: mod_base = OTHER; note = 2'-O-methyl modified nucleotide
  modified_base 81: mod_base = OTHER; note = 2'-O-methyl modified nucleotide
  modified_base 82: mod_base = OTHER; note = 2'-O-methyl modified nucleotide
  modified_base 83: mod_base = OTHER; note = 2'-O-methyl modified nucleotide
  modified_base 84: mod_base = OTHER; note = 2'-O-methyl modified nucleotide
  modified_base 85: mod_base = OTHER; note = 2'-O-methyl modified nucleotide
  modified_base 86: mod_base = OTHER; note = 2'-O-methyl modified nucleotide
  modified_base 87: mod_base = OTHER; note = 2'-O-methyl modified nucleotide
  modified_base 88: mod_base = OTHER; note = 2'-O-methyl modified nucleotide
  modified_base 89: mod_base = OTHER; note = 2'-O-methyl modified nucleotide
  modified_base 90: mod_base = OTHER; note = 2'-O-methyl modified nucleotide
  modified_base 91: mod_base = OTHER; note = 2'-O-methyl modified nucleotide
  modified_base 92: mod_base = OTHER; note = 2'-O-methyl modified nucleotide
  modified_base 93: mod_base = OTHER; note = 2'-O-methyl modified nucleotide
  modified_base 94: mod_base = OTHER; note = 2'-O-methyl modified nucleotide
  modified_base 95: mod_base = OTHER; note = 2'-O-methyl modified nucleotide
  modified_base 96: mod_base = OTHER; note = 2'-O-methyl modified nucleotide
  modified_base 97: mod_base = OTHER; note = 2'-O-methyl modified nucleotide with phosphorothioate linkage
  modified_base 98: mod_base = OTHER; note = 2'-O-methyl modified nucleotide with phosphorothioate linkage
  modified_base 99: mod_base = OTHER; note = 2'-O-methyl modified nucleotide with phosphorothioate linkage
  modified_base 100: mod_base = OTHER; note = 2'-O-methyl modified nucleotide

SEQ ID NO: 288 - RNA, 100 nt, synthetic construct; identical to SEQ ID NO: 274
  source 1..100: mol_type = other RNA
  modified_base 1: mod_base = OTHER; note = 2'-O-methyl modified nucleotide with phosphorothioate linkage
  modified_base 2: mod_base = OTHER; note = 2'-O-methyl modified nucleotide with phosphorothioate linkage
  modified_base 3: mod_base = OTHER; note = 2'-O-methyl modified nucleotide with phosphorothioate linkage
  modified_base 29: mod_base = OTHER; note = 2'-O-methyl modified nucleotide
  modified_base 30: mod_base = OTHER; note = 2'-O-methyl modified nucleotide
  modified_base 31: mod_base = OTHER; note = 2'-O-methyl modified nucleotide
  modified_base 32: mod_base = OTHER; note = 2'-O-methyl modified nucleotide
  modified_base 33: mod_base = OTHER; note = 2'-O-methyl modified nucleotide
  modified_base 34: mod_base = OTHER; note = 2'-O-methyl modified nucleotide
  modified_base 35: mod_base = OTHER; note = 2'-O-methyl modified nucleotide
  modified_base 36: mod_base = OTHER; note = 2'-O-methyl modified nucleotide
  modified_base 37: mod_base = OTHER; note = 2'-O-methyl modified nucleotide
  modified_base 38: mod_base = OTHER; note = 2'-O-methyl modified nucleotide
  modified_base 39: mod_base = OTHER; note = 2'-O-methyl modified nucleotide
  modified_base 40: mod_base = OTHER; note = 2'-O-methyl modified nucleotide
  modified_base 69: mod_base = OTHER; note = 2'-O-methyl modified nucleotide
  modified_base 70: mod_base = OTHER; note = 2'-O-methyl modified nucleotide
  modified_base 71: mod_base = OTHER; note = 2'-O-methyl modified nucleotide
  modified_base 72: mod_base = OTHER; note = 2'-O-methyl modified nucleotide
  modified_base 73: mod_base = OTHER; note = 2'-O-methyl modified nucleotide
  modified_base 74: mod_base = OTHER; note = 2'-O-methyl modified nucleotide
  modified_base 75: mod_base = OTHER; note = 2'-O-methyl modified nucleotide
  modified_base 76: mod_base = OTHER; note = 2'-O-methyl modified nucleotide
  modified_base 77: mod_base = OTHER; note = 2'-O-methyl modified nucleotide
  modified_base 78: mod_base = OTHER; note = 2'-O-methyl modified nucleotide
  modified_base 79: mod_base = OTHER; note = 2'-O-methyl modified nucleotide
  modified_base 80: mod_base = OTHER; note = 2'-O-methyl modified nucleotide
  modified_base 81: mod_base = OTHER; note = 2'-O-methyl modified nucleotide
  modified_base 82: mod_base = OTHER; note = 2'-O-methyl modified nucleotide
  modified_base 83: mod_base = OTHER; note = 2'-O-methyl modified nucleotide
  modified_base 84: mod_base = OTHER; note = 2'-O-methyl modified nucleotide
  modified_base 85: mod_base = OTHER; note = 2'-O-methyl modified nucleotide
  modified_base 86: mod_base = OTHER; note = 2'-O-methyl modified nucleotide
  modified_base 87: mod_base = OTHER; note = 2'-O-methyl modified nucleotide
  modified_base 88: mod_base = OTHER; note = 2'-O-methyl modified nucleotide
  modified_base 89: mod_base = OTHER; note = 2'-O-methyl modified nucleotide
  modified_base 90: mod_base = OTHER; note = 2'-O-methyl modified nucleotide
  modified_base 91: mod_base = OTHER; note = 2'-O-methyl modified nucleotide
  modified_base 92: mod_base = OTHER; note = 2'-O-methyl modified nucleotide
  modified_base 93: mod_base = OTHER; note = 2'-O-methyl modified nucleotide
  modified_base 94: mod_base = OTHER; note = 2'-O-methyl modified nucleotide
  modified_base 95: mod_base = OTHER; note = 2'-O-methyl modified nucleotide
  modified_base 96: mod_base = OTHER; note = 2'-O-methyl modified nucleotide
  modified_base 97: mod_base = OTHER; note = 2'-O-methyl modified nucleotide with phosphorothioate linkage
  modified_base 98: mod_base = OTHER; note = 2'-O-methyl modified nucleotide with phosphorothioate linkage
  modified_base 99: mod_base = OTHER; note = 2'-O-methyl modified nucleotide with phosphorothioate linkage
  modified_base 100: mod_base = OTHER; note = 2'-O-methyl modified nucleotide

SEQ ID NO: 289 - RNA, 100 nt, synthetic construct; identical to SEQ ID NO: 275
  source 1..100: mol_type = other RNA
  modified_base 1: mod_base = OTHER; note = 2'-O-methyl modified nucleotide with phosphorothioate linkage
  modified_base 2: mod_base = OTHER; note = 2'-O-methyl modified nucleotide with phosphorothioate linkage
  modified_base 3: mod_base = OTHER; note = 2'-O-methyl modified nucleotide with phosphorothioate linkage
  modified_base 29: mod_base = OTHER; note = 2'-O-methyl modified nucleotide
  modified_base 30: mod_base = OTHER; note = 2'-O-methyl modified nucleotide
  modified_base 31: mod_base = OTHER; note = 2'-O-methyl modified nucleotide
  modified_base 32: mod_base = OTHER; note = 2'-O-methyl modified nucleotide
  modified_base 33: mod_base = OTHER; note = 2'-O-methyl modified nucleotide
  modified_base 34: mod_base = OTHER; note = 2'-O-methyl modified nucleotide
  modified_base 35: mod_base = OTHER; note = 2'-O-methyl modified nucleotide
  modified_base 36: mod_base = OTHER; note = 2'-O-methyl modified nucleotide
  modified_base 37: mod_base = OTHER; note = 2'-O-methyl modified nucleotide
  modified_base 38: mod_base = OTHER; note = 2'-O-methyl modified nucleotide
  modified_base 39: mod_base = OTHER; note = 2'-O-methyl modified nucleotide
  modified_base 40: mod_base = OTHER; note = 2'-O-methyl modified nucleotide
  modified_base 69: mod_base = OTHER; note = 2'-O-methyl modified nucleotide
  modified_base 70: mod_base = OTHER; note = 2'-O-methyl modified nucleotide
  modified_base 71: mod_base = OTHER; note = 2'-O-methyl modified nucleotide
  modified_base 72: mod_base = OTHER; note = 2'-O-methyl modified nucleotide
  modified_base 73: mod_base = OTHER; note = 2'-O-methyl modified nucleotide
  modified_base 74: mod_base = OTHER; note = 2'-O-methyl modified nucleotide
  modified_base 75: mod_base = OTHER; note = 2'-O-methyl modified nucleotide
  modified_base 76: mod_base = OTHER; note = 2'-O-methyl modified nucleotide
  modified_base 77: mod_base = OTHER; note = 2'-O-methyl modified nucleotide
  modified_base 78: mod_base = OTHER; note = 2'-O-methyl modified nucleotide
  modified_base 79: mod_base = OTHER; note = 2'-O-methyl modified nucleotide
  modified_base 80: mod_base = OTHER; note = 2'-O-methyl modified nucleotide
  modified_base 81: mod_base = OTHER; note = 2'-O-methyl modified nucleotide
  modified_base 82: mod_base = OTHER; note = 2'-O-methyl modified nucleotide
  modified_base 83: mod_base = OTHER; note = 2'-O-methyl modified nucleotide
  modified_base 84: mod_base = OTHER; note = 2'-O-methyl modified nucleotide
  modified_base 85: mod_base = OTHER; note = 2'-O-methyl modified nucleotide
  modified_base 86: mod_base = OTHER; note = 2'-O-methyl modified nucleotide
  modified_base 87: mod_base = OTHER; note = 2'-O-methyl modified nucleotide
  modified_base 88: mod_base = OTHER; note = 2'-O-methyl modified nucleotide
  modified_base 89: mod_base = OTHER; note = 2'-O-methyl modified nucleotide
  modified_base 90: mod_base = OTHER; note = 2'-O-methyl modified nucleotide
  modified_base 91: mod_base = OTHER; note = 2'-O-methyl modified nucleotide
  modified_base 92: mod_base = OTHER; note = 2'-O-methyl modified nucleotide
  modified_base 93: mod_base = OTHER; note = 2'-O-methyl modified nucleotide
  modified_base 94: mod_base = OTHER; note = 2'-O-methyl modified nucleotide
  modified_base 95: mod_base = OTHER; note = 2'-O-methyl modified nucleotide
  modified_base 96: mod_base = OTHER; note = 2'-O-methyl modified nucleotide
  modified_base 97: mod_base = OTHER; note = 2'-O-methyl modified nucleotide with phosphorothioate linkage
  modified_base 98: mod_base = OTHER; note = 2'-O-methyl modified nucleotide with phosphorothioate linkage
  modified_base 99: mod_base = OTHER; note = 2'-O-methyl modified nucleotide with phosphorothioate linkage
  modified_base 100: mod_base = OTHER; note = 2'-O-methyl modified nucleotide

SEQ ID NO: 290 - RNA, 100 nt, synthetic construct; identical to SEQ ID NO: 276
  source 1..100: mol_type = other RNA
  modified_base 1: mod_base = OTHER; note = 2'-O-methyl modified nucleotide with phosphorothioate linkage
  modified_base 2: mod_base = OTHER; note = 2'-O-methyl modified nucleotide with phosphorothioate linkage
  modified_base 3: mod_base = OTHER; note = 2'-O-methyl modified nucleotide with phosphorothioate linkage
  modified_base 29: mod_base = OTHER; note = 2'-O-methyl modified nucleotide
  modified_base 30: mod_base = OTHER; note = 2'-O-methyl modified nucleotide
  modified_base 31: mod_base = OTHER; note = 2'-O-methyl modified nucleotide
  modified_base 32: mod_base = OTHER; note = 2'-O-methyl modified nucleotide
  modified_base 33: mod_base = OTHER; note = 2'-O-methyl modified nucleotide
  modified_base 34: mod_base = OTHER; note = 2'-O-methyl modified nucleotide
  modified_base 35: mod_base = OTHER; note = 2'-O-methyl modified nucleotide
  modified_base 36: mod_base = OTHER; note = 2'-O-methyl modified nucleotide
  modified_base 37: mod_base = OTHER; note = 2'-O-methyl modified nucleotide
  modified_base 38: mod_base = OTHER; note = 2'-O-methyl modified nucleotide
  modified_base 39: mod_base = OTHER; note = 2'-O-methyl modified nucleotide
  modified_base 40: mod_base = OTHER; note = 2'-O-methyl modified nucleotide
  modified_base 69: mod_base = OTHER; note = 2'-O-methyl modified nucleotide
  modified_base 70: mod_base = OTHER; note = 2'-O-methyl modified nucleotide
  modified_base 71: mod_base = OTHER; note = 2'-O-methyl modified nucleotide
  modified_base 72: mod_base = OTHER; note = 2'-O-methyl modified nucleotide
  modified_base 73: mod_base = OTHER; note = 2'-O-methyl modified nucleotide
  modified_base 74: mod_base = OTHER; note = 2'-O-methyl modified nucleotide
  modified_base 75: mod_base = OTHER; note = 2'-O-methyl modified nucleotide
  modified_base 76: mod_base = OTHER; note = 2'-O-methyl modified nucleotide
  modified_base 77: mod_base = OTHER; note = 2'-O-methyl modified nucleotide
  modified_base 78: mod_base = OTHER; note = 2'-O-methyl modified nucleotide
  modified_base 79: mod_base = OTHER; note = 2'-O-methyl modified nucleotide
  modified_base 80: mod_base = OTHER; note = 2'-O-methyl modified nucleotide
  modified_base 81: mod_base = OTHER; note = 2'-O-methyl modified nucleotide
  modified_base 82: mod_base = OTHER; note = 2'-O-methyl modified nucleotide
  modified_base 83: mod_base = OTHER; note = 2'-O-methyl modified nucleotide
  modified_base 84: mod_base = OTHER; note = 2'-O-methyl modified nucleotide
  modified_base 85: mod_base = OTHER; note = 2'-O-methyl modified nucleotide
  modified_base 86: mod_base = OTHER; note = 2'-O-methyl modified nucleotide
  modified_base 87: mod_base = OTHER; note = 2'-O-methyl modified nucleotide
  modified_base 88: mod_base = OTHER; note = 2'-O-methyl modified nucleotide
  modified_base 89: mod_base = OTHER; note = 2'-O-methyl modified nucleotide
  modified_base 90: mod_base = OTHER; note = 2'-O-methyl modified nucleotide
  modified_base 91: mod_base = OTHER; note = 2'-O-methyl modified nucleotide
  modified_base 92: mod_base = OTHER; note = 2'-O-methyl modified nucleotide
  modified_base 93: mod_base = OTHER; note = 2'-O-methyl modified nucleotide
  modified_base 94: mod_base = OTHER; note = 2'-O-methyl modified nucleotide
  modified_base 95: mod_base = OTHER; note = 2'-O-methyl modified nucleotide
  modified_base 96: mod_base = OTHER; note = 2'-O-methyl modified nucleotide
  modified_base 97: mod_base = OTHER; note = 2'-O-methyl modified nucleotide with phosphorothioate linkage
  modified_base 98: mod_base = OTHER; note = 2'-O-methyl modified nucleotide with phosphorothioate linkage
  modified_base 99: mod_base = OTHER; note = 2'-O-methyl modified nucleotide with phosphorothioate linkage
  modified_base 100: mod_base = OTHER; note = 2'-O-methyl modified nucleotide

SEQ ID NO: 291 - RNA, 100 nt, synthetic construct; identical to SEQ ID NO: 277
  source 1..100: mol_type = other RNA
  modified_base 1: mod_base = OTHER; note = 2'-O-methyl modified nucleotide with phosphorothioate linkage
  modified_base 2: mod_base = OTHER; note = 2'-O-methyl modified nucleotide with phosphorothioate linkage
  modified_base 3: mod_base = OTHER; note = 2'-O-methyl modified nucleotide with phosphorothioate linkage
  modified_base 29: mod_base = OTHER; note = 2'-O-methyl modified nucleotide
  modified_base 30: mod_base = OTHER; note = 2'-O-methyl modified nucleotide
  modified_base 31: mod_base = OTHER; note = 2'-O-methyl modified nucleotide
  modified_base 32: mod_base = OTHER; note = 2'-O-methyl modified nucleotide
  modified_base 33: mod_base = OTHER; note = 2'-O-methyl modified nucleotide
  modified_base 34: mod_base = OTHER; note = 2'-O-methyl modified nucleotide
  modified_base 35: mod_base = OTHER; note = 2'-O-methyl modified nucleotide
  modified_base 36: mod_base = OTHER; note = 2'-O-methyl modified nucleotide
  modified_base 37: mod_base = OTHER; note = 2'-O-methyl modified nucleotide
  modified_base 38: mod_base = OTHER; note = 2'-O-methyl modified nucleotide
  modified_base 39: mod_base = OTHER; note = 2'-O-methyl modified nucleotide
  modified_base 40: mod_base = OTHER; note = 2'-O-methyl modified nucleotide
  modified_base 69: mod_base = OTHER; note = 2'-O-methyl modified nucleotide
  modified_base 70: mod_base = OTHER; note = 2'-O-methyl modified nucleotide
  modified_base 71: mod_base = OTHER; note = 2'-O-methyl modified nucleotide
  modified_base 72: mod_base = OTHER; note = 2'-O-methyl modified nucleotide
  modified_base 73: mod_base = OTHER; note = 2'-O-methyl modified nucleotide
  modified_base 74: mod_base = OTHER; note = 2'-O-methyl modified nucleotide
  modified_base 75: mod_base = OTHER; note = 2'-O-methyl modified nucleotide
  modified_base 76: mod_base = OTHER; note = 2'-O-methyl modified nucleotide
  modified_base 77: mod_base = OTHER; note = 2'-O-methyl modified nucleotide
  modified_base 78: mod_base = OTHER; note = 2'-O-methyl modified nucleotide
  modified_base 79: mod_base = OTHER; note = 2'-O-methyl modified nucleotide
  modified_base 80: mod_base = OTHER; note = 2'-O-methyl modified nucleotide
  modified_base 81: mod_base = OTHER; note = 2'-O-methyl modified nucleotide
  modified_base 82: mod_base = OTHER; note = 2'-O-methyl modified nucleotide
  modified_base 83: mod_base = OTHER; note = 2'-O-methyl modified nucleotide
  modified_base 84: mod_base = OTHER; note = 2'-O-methyl modified nucleotide
  modified_base 85: mod_base = OTHER; note = 2'-O-methyl modified nucleotide
  modified_base 86: mod_base = OTHER; note = 2'-O-methyl modified nucleotide
  modified_base 87: mod_base = OTHER; note = 2'-O-methyl modified nucleotide
  modified_base 88: mod_base = OTHER; note = 2'-O-methyl modified nucleotide
  modified_base 89: mod_base = OTHER; note = 2'-O-methyl modified nucleotide
  modified_base 90: mod_base = OTHER; note = 2'-O-methyl modified nucleotide
  modified_base 91: mod_base = OTHER; note = 2'-O-methyl modified nucleotide
  modified_base 92: mod_base = OTHER; note = 2'-O-methyl modified nucleotide
  modified_base 93: mod_base = OTHER; note = 2'-O-methyl modified nucleotide
  modified_base 94: mod_base = OTHER; note = 2'-O-methyl modified nucleotide
  modified_base 95: mod_base = OTHER; note = 2'-O-methyl modified nucleotide
  modified_base 96: mod_base = OTHER; note = 2'-O-methyl modified nucleotide
  modified_base 97: mod_base = OTHER; note = 2'-O-methyl modified nucleotide with phosphorothioate linkage
  modified_base 98: mod_base = OTHER; note = 2'-O-methyl modified nucleotide with phosphorothioate linkage
  modified_base 99: mod_base = OTHER; note = 2'-O-methyl modified nucleotide with phosphorothioate linkage
  modified_base 100: mod_base = OTHER; note = 2'-O-methyl modified nucleotide

SEQ ID NO: 292 - RNA, 100 nt, synthetic construct; identical to SEQ ID NO: 278
  source 1..100: mol_type = other RNA
  modified_base 1: mod_base = OTHER; note = 2'-O-methyl modified nucleotide with phosphorothioate linkage
  modified_base 2: mod_base = OTHER; note = 2'-O-methyl modified nucleotide with phosphorothioate linkage
  modified_base 3: mod_base = OTHER; note = 2'-O-methyl modified nucleotide with phosphorothioate linkage
  modified_base 29: mod_base = OTHER; note = 2'-O-methyl modified nucleotide
  modified_base 30: mod_base = OTHER; note = 2'-O-methyl modified nucleotide
  modified_base 31: mod_base = OTHER; note = 2'-O-methyl modified nucleotide
  modified_base 32: mod_base = OTHER; note = 2'-O-methyl modified nucleotide
  modified_base 33: mod_base = OTHER; note = 2'-O-methyl modified nucleotide
  modified_base 34: mod_base = OTHER; note = 2'-O-methyl modified nucleotide
  modified_base 35: mod_base = OTHER; note = 2'-O-methyl modified nucleotide
  modified_base 36: mod_base = OTHER; note = 2'-O-methyl modified nucleotide
  modified_base 37: mod_base = OTHER; note = 2'-O-methyl modified nucleotide
  modified_base 38: mod_base = OTHER; note = 2'-O-methyl modified nucleotide
  modified_base 39: mod_base = OTHER; note = 2'-O-methyl modified nucleotide
  modified_base 40: mod_base = OTHER; note = 2'-O-methyl modified nucleotide
  modified_base 69: mod_base = OTHER; note = 2'-O-methyl modified nucleotide
  modified_base 70: mod_base = OTHER; note = 2'-O-methyl modified nucleotide
  modified_base 71: mod_base = OTHER; note = 2'-O-methyl modified nucleotide
  modified_base 72: mod_base = OTHER; note = 2'-O-methyl modified nucleotide
  modified_base 73: mod_base = OTHER; note = 2'-O-methyl modified nucleotide
  modified_base 74: mod_base = OTHER; note = 2'-O-methyl modified nucleotide
  modified_base 75: mod_base = OTHER; note = 2'-O-methyl modified nucleotide
  modified_base 76: mod_base = OTHER; note = 2'-O-methyl modified nucleotide
  modified_base 77: mod_base = OTHER; note = 2'-O-methyl modified nucleotide
  modified_base 78: mod_base = OTHER; note = 2'-O-methyl modified nucleotide
  modified_base 79: mod_base = OTHER; note = 2'-O-methyl modified nucleotide
  modified_base 80: mod_base = OTHER; note = 2'-O-methyl modified nucleotide
  modified_base 81: mod_base = OTHER; note = 2'-O-methyl modified nucleotide
  modified_base 82: mod_base = OTHER; note = 2'-O-methyl modified nucleotide
  modified_base 83: mod_base = OTHER; note = 2'-O-methyl modified nucleotide
  modified_base 84: mod_base = OTHER; note = 2'-O-methyl modified nucleotide
  modified_base 85: mod_base = OTHER; note = 2'-O-methyl modified nucleotide
  modified_base 86: mod_base = OTHER; note = 2'-O-methyl modified nucleotide
  modified_base 87: mod_base = OTHER; note = 2'-O-methyl modified nucleotide
  modified_base 88: mod_base = OTHER; note = 2'-O-methyl modified nucleotide
  modified_base 89: mod_base = OTHER; note = 2'-O-methyl modified nucleotide
  modified_base 90: mod_base = OTHER; note = 2'-O-methyl modified nucleotide
  modified_base 91: mod_base = OTHER; note = 2'-O-methyl modified nucleotide
  modified_base 92: mod_base = OTHER; note = 2'-O-methyl modified nucleotide
  modified_base 93: mod_base = OTHER; note = 2'-O-methyl modified nucleotide
  modified_base 94: mod_base = OTHER; note = 2'-O-methyl modified nucleotide
  modified_base 95: mod_base = OTHER; note = 2'-O-methyl modified nucleotide
  modified_base 96: mod_base = OTHER; note = 2'-O-methyl modified nucleotide
  modified_base 97: mod_base = OTHER; note = 2'-O-methyl modified nucleotide with phosphorothioate linkage
  modified_base 98: mod_base = OTHER; note = 2'-O-methyl modified nucleotide with phosphorothioate linkage
  modified_base 99: mod_base = OTHER; note = 2'-O-methyl modified nucleotide with phosphorothioate linkage
  modified_base 100: mod_base = OTHER; note = 2'-O-methyl modified nucleotide

SEQ ID NO: 293 - RNA, 4140 nt, synthetic construct
  source 1..4140: mol_type = other RNA
atggacaagaagtacagcatcggactggacatcggaacaaacagcgtcggatgggcagtcatcacagacgaatacaaggtcccgagcaagaagttcaaggtcctgggaaacacagacagacacagcatcaagaagaacctgatcggagcactgctgttcgacagcggagaaacagcagaagcaacaagactgaagagaacagcaagaagaagatacacaagaagaaagaacagaatctgctacctgcaggaaatcttcagcaacgaaatggcaaaggtcgacgacagcttcttccacagactggaagaaagcttcctggtcgaagaagacaagaagcacgaaagacacccgatcttcggaaacatcgtcgacgaagtcgcataccacgaaaagtacccgacaatctaccacctgagaaagaagctggtcgacagcacagacaaggcagacctgagactgatctacctggcactggcacacatgatcaagttcagaggacacttcctgatcgaaggagacctgaacccggacaacagcgacgtcgacaagctgttcatccagctggtccagacatacaaccagctgttcgaagaaaacccgatcaacgcaagcggagtcgacgcaaaggcaatcctgagcgcaagactgagcaagagcagaagactggaaaacctgatcgcacagctgccgggagaaaagaagaacggactgttcggaaacctgatcgcactgagcctgggactgacaccgaacttcaagagcaacttcgacctggcagaagacgcaaagctgcagctgagcaaggacacatacgacgacgacctggacaacctgctggcacagatcggagaccagtacgcagacctgttcctggcagcaaagaacctgagcgacgcaatcctgctgagcgacatcctgagagtcaacacagaaatcacaaaggcaccgctgagcgcaagcatgatcaagagatacgacgaacaccaccaggacctgacactgctgaaggcactggtcagacagcagctgccggaaaagtacaaggaaatcttcttcgaccagagcaagaacggatacgcaggatacatcgacggaggagcaagccaggaagaattctacaagttcatcaagccgatcctggaaaagatggacggaacagaagaactgctggtcaagctgaacagagaagacctgctgagaaagcagagaacattcgacaacggaagcatcccgcaccagatccacctgggagaactgcacgcaatcctgagaagacaggaagacttctacccgttcctgaaggacaacagagaaaagatcgaaaagatcctgacattcagaatcccgtactacgtcggaccgctggcaagaggaaacagcagattcgcatggatgacaagaaagagcgaagaaacaatcacaccgtggaacttcgaagaagtcgtcgacaagggagcaagcgcacagagcttcatcgaaagaatgacaaacttcgacaagaacctgccgaacgaaaaggtcctgccgaagcacagcctgctgtacgaatacttcacagtctacaacgaactgacaaaggtcaagtacgtcacagaaggaatgagaaagccggcattcctgagcggagaacagaagaaggcaatcgtcgacctgctgttcaagacaaacagaaaggtcacagtcaagcagctgaaggaagactacttcaagaagatcgaatgcttcgacagcgtcgaaatcagcggagtcgaagacagattcaacgcaagcctgggaacataccacgacctgctgaagatcatcaaggacaaggacttcctggacaacgaagaaaacgaagacatcctggaagacatcgtcctgacactgacactgttcgaagacagagaaatgatcgaagaaagactgaagacatacgcacacctgttcgacgacaaggtcatgaagcagctgaagagaagaagatacacaggatggggaagactgagcagaaagctgatcaacggaatcagagacaagcagagcggaaagacaatcctggacttcctgaagagcgacggattcgcaaacagaaacttcatgcagctgatccacgacgacagcctgacattcaaggaagacatccagaaggcacaggtcagcggacagggagacagcctgcacgaacacatcgcaaacctggcaggaagcccggcaatcaagaagggaatcctgcagacagtcaaggtcgtcgacgaactggtcaaggtcatgggaagacacaagccggaaaacatcgtcatcgaaatggcaagagaaaaccagacaacacagaagggacagaagaacagcagagaaagaatgaagagaatcgaagaaggaatcaaggaactgggaagccagatcctgaaggaacacccggtcgaaaacacacagctgcagaacgaaaagctgtacctgtactacctgcagaacggaagagacatgtacgtcgaccaggaactggacatcaacagactgagcgactacgacgtcgaccacatcgtcccgcagagcttcctgaaggacgacagcatcgacaacaaggtcctgacaagaagcgacaagaacagaggaaagagcgacaacgtcccgagcgaagaagtcgtcaagaagatgaagaactactggagacagctgctgaacgcaaagctgatcacacagagaaagttcgacaacctgacaaaggcagagagaggaggactgagcgaactggacaaggcaggattcatcaagagacagctggtcgaaacaagacagatcacaaagcacgtcgcacagatcctggacagcagaatgaacacaaagtacgacgaaaacgacaagctgatcagagaagtcaaggtcatcacactgaagagcaagctggtcagcgacttcagaaaggacttccagttctacaaggtcagagaaatcaacaactaccaccacgcacacgacgcatacctgaacgcagtcgtcggaacagcactgatcaagaagtacccgaagctggaaagcgaattcgtctacggagactacaaggtctacgacgtcagaaagatgatcgcaaagagcgaacaggaaatcggaaaggcaacagcaaagtacttcttctacagcaacatcatgaacttcttcaagacagaaatcacactggcaaacggagaaatcagaaagagaccgctgatcgaaacaaacggagaaacaggagaaatcgtctgggacaagggaagagacttcgcaacagtcagaaaggtcctgagcatgccgcaggtcaacatcgtcaagaagacagaagtccagacaggaggattcagcaaggaaagcatcctgccgaagagaaacagcgacaagctgatcgcaagaaagaaggactgggacccgaagaagtacggaggattcgacagcccgacagtcgcatacagcgtcctggtcgtcgcaaaggtcgaaaagggaaagagcaagaagctgaagagcgtcaaggaactgctgggaatcacaatcatggaaagaagcagcttcgaaaagaacccgatcgacttcctggaagcaaagggatacaaggaagtcaagaaggacctgatcatcaagctgccgaagtacagcctgttcgaactggaaaacggaagaaagagaatgctggcaagcgcaggagaactgcagaagggaaacgaactggcactgccgagcaagtacgtcaacttcctgtacctggcaagccactacgaaaagctgaagggaagcccggaagacaacgaacagaagcagctgttcgtcgaacagcacaagcactacctggacgaaatcatcgaacagatcagcgaattcagcaagagagtcatcctggcagacgcaaacctggacaaggtcctgagcgcatacaacaagcacagagacaagccgatcagagaacaggcagaaaacatcatccacctgttcacactgacaaacctgggagcaccggcagcattcaagtacttcgacacaacaatcgacagaaagagatacacaagcacaaaggaagtcctggacgcaacactgatccaccagagcatcacaggactgtacgaaacaagaatcgacctgagccagctgggaggagacggaggaggaagcccgaagaagaagagaaaggtctag

SEQ ID NO: 294 - protein, 1379 aa, synthetic construct; identical to SEQ ID NO: 156

SEQ ID NO: 295 - RNA, 4140 nt, synthetic construct
  source 1..4140: mol_type = other RNA
atggacaagaagtactccatcggcctggacatcggcaccaactccgtgggctgggccgtgatcaccgacgagtacaaggtgccctccaagaagttcaaggtgctgggcaacaccgaccggcactccatcaagaagaacctgatcggcgccctgctgttcgactccggcgagaccgccgaggccacccggctgaagcggaccgcccggcggcggtacacccggcggaagaaccggatctgctacctgcaggagatcttctccaacgagatggccaaggtggacgactccttcttccaccggctggaggagtccttcctggtggaggaggacaagaagcacgagcggcaccccatcttcggcaacatcgtggacgaggtggcctaccacgagaagtaccccaccatctaccacctgcggaagaagctggtggactccaccgacaaggccgacctgcggctgatctacctggccctggcccacatgatcaagttccggggccacttcctgatcgagggcgacctgaaccccgacaactccgacgtggacaagctgttcatccagctggtgcagacctacaaccagctgttcgaggagaaccccatcaacgcctccggcgtggacgccaaggccatcctgtccgcccggctgtccaagtcccggcggctggagaacctgatcgcccagctgcccggcgagaagaagaacggcctgttcggcaacctgatcgccctgtccctgggcctgacccccaacttcaagtccaacttcgacctggccgaggacgccaagctgcagctgtccaaggacacctacgacgacgacctggacaacctgctggcccagatcggcgaccagtacgccgacctgttcctggccgccaagaacctgtccgacgccatcctgctgtccgacatcctgcgggtgaacaccgagatcaccaaggcccccctgtccgcctccatgatcaagcggtacgacgagcaccaccaggacctgaccctgctgaaggccctggtgcggcagcagctgcccgagaagtacaaggagatcttcttcgaccagtccaagaacggctacgccggctacatcgacggcggcgcctcccaggaggagttctacaagttcatcaagcccatcctggagaagatggacggcaccgaggagctgctggtgaagctgaaccgggaggacctgctgcggaagcagcggaccttcgacaacggctccatcccccaccagatccacctgggcgagctgcacgccatcctgcggcggcaggaggacttctaccccttcctgaaggacaaccgggagaagatcgagaagatcctgaccttccggatcccctactacgtgggccccctggcccggggcaactcccggttcgcctggatgacccggaagtccgaggagaccatcaccccctggaacttcgaggaggtggtggacaagggcgcctccgcccagtccttcatcgagcggatgaccaacttcgacaagaacctgcccaacgagaaggtgctgcccaagcactccctgctgtacgagtacttcaccgtgtacaacgagctgaccaaggtgaagtacgtgaccgagggcatgcggaagcccgccttcctgtccggcgagcagaagaaggccatcgtggacctgctgttcaagaccaaccggaaggtgaccgtgaagcagctgaaggaggactacttcaagaagatcgagtgcttcgactccgtggagatctccggcgtggaggaccggttcaacgcctccctgggcacctaccacgacctgctgaagatcatcaaggacaaggacttcctggacaacgaggagaacgaggacatcctggaggacatcgtgctgaccctgaccctgttcgaggaccgggagatgatcgaggagcggctgaagacctacgcccacctgttcgacgacaaggtgatgaagcagctgaagcggcggcggtacaccggctggggccggctgtcccggaagctgatcaacggcatccgggacaagcagtccggcaagaccatcctggacttcctgaagtccgacggcttcgccaaccggaacttcatgcagctgatccacgacgactccctgaccttcaaggaggacatccagaaggcccaggtgtccggccagggcgactccctgcacgagcacatcgccaacctggccggctcccccgccatcaagaagggcatcctgcagaccgtgaaggtggtggacgagctggtgaaggtgatgggccggcacaagcccgagaacatcgtgatcgagatggcccgggagaaccagaccacccagaagggccagaagaactcccgggagcggatgaagcggatcgaggagggcatcaaggagctgggctcccagatcctgaaggagcaccccgtggagaacacccagctgcagaacgagaagctgtacctgtactacctgcagaacggccgggacatgtacgtggaccaggagctggacatcaaccggctgtccgactacgacgtggaccacatcgtgccccagtccttcctgaaggacgactccatcgacaacaaggtgctgacccggtccgacaagaaccggggcaagtccgacaacgtgccctccgaggaggtggtgaagaagatgaagaactactggcggcagctgctgaacgccaagctgatcacccagcggaagttcgacaacctgaccaaggccgagcggggcggcctgtccgagctggacaaggccggcttcatcaagcggcagctggtggagacccggcagatcaccaagcacgtggcccagatcctggactcccggatgaacaccaagtacgacgagaacgacaagctgatccgggaggtgaaggtgatcaccctgaagtccaagctggtgtccgacttccggaaggacttccagttctacaaggtgcgggagatcaacaactaccaccacgcccacgacgcctacctgaacgccgtggtgggcaccgccctgatcaagaagtaccccaagctggagtccgagttcgtgtacggcgactacaaggtgtacgacgtgcggaagatgatcgccaagtccgagcaggagatcggcaaggccaccgccaagtacttcttctactccaacatcatgaacttcttcaagaccgagatcaccctggccaacggcgagatccggaagcggcccctgatcgagaccaacggcgagaccggcgagatcgtgtgggacaagggccgggacttcgccaccgtgcggaaggtgctgtccatgccccaggtgaacatcgtgaagaagaccgaggtgcagaccggcggcttctccaaggagtccatcctgcccaagcggaactccgacaagctgatcgcccggaagaaggactgggaccccaagaagtacggcggcttcgactcccccaccgtggcctactccgtgctggtggtggccaaggtggagaagggcaagtccaagaagctgaagtccgtgaaggagctgctgggcatcaccatcatggagcggtcctccttcgagaagaaccccatcgacttcctggaggccaagggctacaaggaggtgaagaaggacctgatcatcaagctgcccaagtactccctgttcgagctggagaacggccggaagcggatgctggcctccgccggcgagctgcagaagggcaacgagctggccctgccctccaagtacgtgaacttcctgtacctggcctcccactacgagaagctgaagggctcccccgaggacaacgagcagaagcagctgttcgtggagcagcacaagcactacctggacgagatcatcgagcagatctccgagttctccaagcgggtgatcctggccgacgccaacctggacaaggtgctgtccgcctacaacaagcaccgggacaagcccatccgggagcaggccgagaacatcatccacctgttcaccctgaccaacctgggcgcccccgccgccttcaagtacttcgacaccaccatcgaccggaagcggtacacctccaccaaggaggtgctggacgccaccctgatccaccagtccatcaccggcctgtacgagacccggatcgacctgtcccagctgggcggcgacggcggcggctcccccaagaagaagcggaaggtgtga

SEQ ID NO: 296 - protein, 1379 aa, synthetic construct; identical to SEQ ID NO: 156

SEQ ID NO: 297 - DNA, 4265 bp, synthetic construct
  source 1..4265: mol_type = other DNA
ttggccactccctctctgcgcgctcgctcgctcactgaggccgggcgaccaaaggtcgcccgacgcccgggctttgcccgggcggcctcagtgagcgagcgagcgcgcagagagggagtggccaactccatcactaggggttcctagatcttgccaacataccataaacctcccattctgctaatgcccagcctaagttggggagaccactccagattccaagatgtacagtttgctttgctgggcctttttcccatgcctgcctttactctgccagagttatattgctggggttttgaagaagatcctattaaataaaagaataagcagtattattaagtagccctgcatttcaggtttccttgagtggcaggccaggcctggccgtgaacgttcactgaaatcatggcctcttggccaagattgatagcttgtgcctgtccctgagtcccagtccatcacgagcagctggtttctaagatgctatttcccgtataaagcatgagaccgtgacttgccagccccacagagccccgcccttgtccatcactggcatctggactccagcctgggttggggcaaagagggaaatgagatcatgtcctaaccctgatcctcttgtcccacagatatccagaaccctgaccctgcggctccggtgcccgtcagtgggcagagcgcacatcgcccacagtccccgagaagttggggggaggggtcggcaattgaaccggtgcctagagaaggtggcgcggggtaaactgggaaagtgatgtcgtgtactggctccgcctttttcccgagggtgggggagaaccgtatataagtgcagtagtcgccgtgaacgttctttttcgcaacgggtttgccgccagaacacaggtaagtgccgtgtgtggttcccgcgggcctggcctctttacgggttatggcccttgcgtgccttgaattacttccacgcccctggctgcagtacgtgattcttgatcccgagcttcgggttggaagtgggtgggagagttcgaggccttgcgcttaaggagccccttcgcctcgtgcttgagttgaggcctggcttgggcgctggggccgccgcgtgcgaatctggtggcaccttcgcgcctgtctcgctgctttcgataagtctctagccatttaaaatttttgatgacctgctgcgacgctttttttctggcaagatagtcttgtaaatgcgggccaagatgtgcacactggtatttcggtttttggggccgcgggcggcgacggggcccgtgcgtcccagcgcacatgttcggcgaggcggggcctgcgagcgcggccaccgagaatcggacgggggtagtctcaagctggccggcctgctctggtgcctggcctcgcgccgccgtgtatcgccccgccctgggcggcaaggctggcccggtcggcaccagttgcgtgagcggaaagatggccgcttcccggccctgctgcagggagctcaaaatggaggacgcggcgctcgggagagcgggcgggtgagtcacccacacaaaggaaaagggcctttccgtcctcagccgtcgcttcatgtgactccacggagtaccgggcgccgtccaggcacctcgattagttctcgagcttttggagtacgtcgtctttaggttggggggaggggttttatgcgatggagtttccccacactgagtgggtggagactgaagttaggccagcttggcacttgatgtaattctccttggaatttgccctttttgagtttggatcttggttcattctcaagcctcagacagtggttcaaagtttttttcttccatttcaggtgtcgtgatgcggccgccaccatggccctgcccgtgaccgccctgctgctgcccctggccctgctgctgcacgccgcccggccccaggtgcagctggtggagagcggcggcggcctggtgcagcccggcggcagcctgcggctgagctgcgtggccagcggcttcaccttcagcagcaacgccatgagctgggtgcggcaggcccccggcaagggcctggagtgggtgagcgccatcagcggcagcggcgactacacccactacagcgacagcgtgaagggccggttcaccatcagccgggacaacagcaagaacaccctgtacctgcagatgaacagcctgcgggccgaggacaccgccgtgtactactgcgccaaggaggtgcccggcggccccctggtggacttcgacagccggggccagggcaccctggtgaccgtgagcagcggcggcggcggcagccaggtgcagctggtggagagcggcggcggcctggtgcagcccggcggcagcctgcggctgagctgcgtggccagcggcttcaccttcagcagcaacgccatgagctgggtgcggcaggcccccggcaagggcctggagtgggtgagcgccatcagcggcagcggcgactacacccactacagcgacagcgtgaagggccggttcaccatcagccgggacaacagcaagaacaccctgtacctgcagatgaacagcctgcgggccgaggacaccgccgtgtactactgcgccaaggaggtgcccggcggccccctggtggacttcgacagccggggccagggcaccctggtgaccgtgagcagcaccaccacccccgccccccggccccccacccccgcccccaccatcgccagccagcccctgagcctgcggcccgaggcctgccggcccgccgccggcggcgccgtgcacacccggggcctggacttcgcctgcgacttctgggtgctggtggtggtgggcggcgtgctggcctgctacagcctgctggtgaccgtggccttcatcatcttctgggtgcggagcaagcggagccggctgctgcacagcgactacatgaacatgaccccccggcggcccggccccacccggaagcactaccagccctacgcccccccccgggacttcgccgcctaccggagccgggtgaagttcagccggagcgccgacgcccccgcctaccagcagggccagaaccagctgtacaacgagctgaacctgggccggcgggaggagtacgacgtgctggacaagcggcggggccgggaccccgagatgggcggcaagccccggcggaagaacccccaggagggcctgtacaacgagctgcagaaggacaagatggccgaggcctacagcgagatcggcatgaagggcgagcggcggcggggcaagggccacgacggcctgtaccagggcctgagcaccgccaccaaggacacctacgacgccctgcacatgcaggccctgcccccccggtaatgacctcgactgtgccttctagttgccagccatctgttgtttgcccctcccccgtgccttccttgaccctggaaggtgccactcccactgtcctttcctaataaaatgaggaaattgcatcgcattgtctgagtaggtgtcattctattctggggggtggggtggggcaggacagcaagggggaggattgggaagacaatagcaggcatgctggggatgcggtgggctctatggcttctgaggcggaaagaaccagctggggctctagggggtatccccactagtcgtgtaccagctgagagactctaaatccagtgacaagtctgtctgcctattcaccgattttgattctcaaacaaatgtgtcacaaagtaaggattctgatgtgtatatcacagacaaaactgtgctagacatgaggtctatggacttcaagagcaacagtgctgtggcctggagcaacaaatctgactttgcatgtgcaaacgccttcaacaacagcattattccagaagacaccttcttccccagcccaggtaagggcagctttggtgccttcgcaggctgtttccttgcttcaggaatggccaggttctgcccagagctctggtcaatgatgtctaaaactcctctgattggtggtctcggccttatccattgccaccaaaaccctctttttactaagaaacagtgagccttgttctggcagtccagagaatgacacgggaaaaaagcagatgaagagaaggtggcaggagagggcacgtggcccagcctcagtctctagatctaggaacccctagtgatggagttggccactccctctctgcgcgctcgctcgctcactgaggccgcccgggcaaagcccgggcgtcgggcgacctttggtcgcccggcctcagtgagcgagcgagcgcgcagagagggagtggccaa

SEQ ID NO: 298 - DNA, 3042 bp, synthetic construct
  source 1..3042: mol_type = other DNA
taggtcagtgaagagaagaacaaaaagcagcatattacagttagttgtcttcatcaatctttaaatatgttgtgtggtttttctctccctgtttccacagttgaggacccccagggcgacgccgcccagaagaccgacaccagccaccacgaccaggaccaccccaccttcaacaagatcacccccaacctggccgagttcgccttcagcctgtacaggcagctggcccaccagagcaacagcaccaacatcttcttcagccccgtgagcatcgccaccgccttcgccatgctgagcctgggcaccaaggccgacacccacgacgagatcctggagggcctgaacttcaacctgaccgagatccccgaggcccagatccacgagggcttccaggagctgctgaggaccctgaaccagcccgacagccagctgcagctgaccaccggcaacggcctgttcctgagcgagggcctgaagctggtggacaagttcctggaggacgtgaagaagctgtaccacagcgaggccttcaccgtgaacttcggcgacaccgaggaggccaagaagcagatcaacgactacgtggagaagggcacccagggcaagatcgtggacctggtgaaggagctggacagggacaccgtgttcgccctggtgaactacatcttcttcaagggcaagtgggagaggcccttcgaggtgaaggacaccgaggaggaggacttccacgtggaccaggtgaccaccgtgaaggtgcccatgatgaagaggctgggcatgttcaacatccagcactgcaagaagctgagcagctgggtgctgctgatgaagtacctgggcaacgccaccgccatcttcttcctgcccgacgagggcaagctgcagcacctggagaacgagctgacccacgacatcatcaccaagttcctggagaacgaggacaggaggagcgccagcctgcacctgcccaagctgagcatcaccggcacctacgacctgaagagcgtgctgggccagctgggcatcaccaaggtgttcagcaacggcgccgacctgagcggcgtgaccgaggaggcccccctgaagctgagcaaggccgtgcacaaggccgtgctgaccatcgacgagaagggcaccgaggccgccggcgccatgttcctggaggccatccccatgagcatcccccccgaggtgaagttcaacaagcccttcgtgttcctgatgatcgagcagaacaccaagagccccctgttcatgggcaaggtggtgaaccccacccagaagtaacagacatgataagatacattgatgagtttggacaaaccacaactagaatgcagtgaaaaaaatgctttatttgtgaaatttgtgatgctattgctttatttgtaaccattataagctgcaataaacaagttaacaacaacaattgcattcattttatgtttcaggttcagggggaggtgtgggaggttttttggggataccccctagagccccagctggttctttccgcctcagaagccatagagcccaccgcatccccagcatgcctgctattgtcttcccaatcctcccccttgctgtcctgccccaccccaccccccagaatagaatgacacctactcagacaatgcgatgcaatttcctcattttattaggaaaggacagtgggagtggcaccttccagggtcaaggaaggcacgggggaggggcaaacaacagatggctggcaactagaaggcacagtcgaggttatttttgggtgggattcaccacttttcccatgaagaggggagacttggtattttgttcaatcattaagaagacaaagggtttgttgaacttgacctcgggggggatagacatgggtatggcctctaaaaacatggccccagcagcttcagtccctttctcgtcgatggtcagcacagccttatgcacggccttggagagcttcaggggtgcctcctctgtgaccccggagaggtcagccccattgctgaagaccttagtgatgcccagttgacccaggacgctcttcagatcataggttccagtaatggacagtttgggtaaatgtaagctggcagaccttctgtcttcattttccaggaacttggtgatgatatcgtgggtgagttcattttccaggtgctgtagtttcccctcatcaggcaggaagaagatggcggtggcattgcccaggtatttcatcagcagcacccagctggacagcttcttacagtgctggatgttaaacatgcctaaacgcttcatcataggcaccttcacggtggtcacctggtccacgtggaagtcctcttcctcggtgtccttgacttcaaagggtctctcccatttgcctttaaagaagatgtaattcaccagagcaaaaactgtgtctctgtcaagctccttgaccaaatccacaattttcccttgagtacccttctccacgtaatcgttgatctgtttcttggcctcttcggtgtccccgaagttgacagtgaaggcttctgagtggtacaactttttaacatcctccaaaaacttatccactagcttcaggccctcgctgaggaacaggccattgccggtggtcagctggagctggctgtctggctggttgagggtacggaggagttcctggaagccttcatggatctgagcctccggaatctccgtgaggttgaaattcaggccctccaggatttcatcgtgagtgtcagccttggtccccagggagagcattgcaaaggctgtagcgatgctcactggggagaagaagatattggtgctgttggactggtgtgccagctggcggtataggctgaaggcgaactcagccaggttgggggtgatcttgttgaaggttgggtgatcctgatcatggtgggatgtatctgtcttctgggcagcatctccctggggatcctcaactgtggaaacagggagagaaaaaccacacaacatatttaaagattgatgaagacaactaactgtaatatgctgctttttgttcttctcttcactgaccta

SEQ ID NO: 299 - DNA, 4305 bp, synthetic construct
  source 1..4305: mol_type = other DNA
tggccctggctttggcagcctgtgctgacccatgcagtcctccttaccatccctccctcgacttcccctcttccgatgttgagcccctccagccggtcctggactttgtctccttccctgccctgccctctcctgaacctgagccagctcccatagctcagtctggtctatctgcctggccctggccattgtcactttgcgctgccctcctctcgcccccgagtgcccttgctgtgccgccggaactctgccctctaacgctgccgtctctctcctgagtccggaccactttgagctctactggcttctgcgccgcctctggcccactgtttccccttcccaggcaggtcctgctttctctgacctgcattctctcccctgggcctgtgccgctttctgtctgcagcttgtggcctgggtcacctctacggctggcccagatccttccctgccgcctccttcaggttccgtcttcctccactccctcttccccttgctctctgctgtgttgctgcccaaggatgctctttccggagcacttccttctcggcgctgcaccacgtgatgtcctctgagcggatcctccccgtgtctgggtcctctccgggcatctctcctccctcacccaaccccatgccgtcttcactcgctgggttcccttttccttctccttctggggcctgtgccatctctcgtttcttaggatggccttctccgacggatgtctcccttgcgtcccgcctccccttcttgtaggcctgcatcatcaccgtttttctggacaaccccaaagtaccccgtctccctggctttagccacctctccatcctcttgctttctttgcctggacaccccgttctcctgtggattcgggtcacctctcactcctttcatttgggcagctcccctaccccccttacctctctagtctgtgctagctcttccagccctagttattaatgagtaattcatacaaaaggactcgcccctgccttggggaatcccagggaccgtcgttaaactcccactaacgtagaacccagagatcgctgcgttcccgccccctcacccgcccgctctcgtcatcactgaggtggagaagagcatgcgtgaggctccggtgcccgtcagtgggcagagcgcacatcgcccacagtccccgagaagttggggggaggggtcggcaattgaaccggtgcctagagaaggtggcgcggggtaaactgggaaagtgatgtcgtgtactggctccgcctttttcccgagggtgggggagaaccgtatataagtgcagtagtcgccgtgaacgttctttttcgcaacgggtttgccgccagaacacaggtaagtgccgtgtgtggttcccgcgggcctggcctctttacgggttatggcccttgcgtgccttgaattacttccacgcccctggctgcagtacgtgattcttgatcccgagcttcgggttggaagtgggtgggagagttcgaggccttgcgcttaaggagccccttcgcctcgtgcttgagttgaggcctggcttgggcgctggggccgccgcgtgcgaatctggtggcaccttcgcgcctgtctcgctgctttcgataagtctctagccatttaaaatttttgatgacctgctgcgacgctttttttctggcaagatagtcttgtaaatgcgggccaacatctgcacactggtatttcggtttttggggccgcgggcggcgacggggcccgtgcgtcccagcgcacatgttcggcgaggcggggcctgcgagcgcggccaccgagaatcggacgggggtagtctcaagctggccggcctgctctggtgcctggcctcgcgccgccgtgtatcgccccgccctgggcggcaaggctggcccggtcggcaccagttgcgtgagcggaaagatggccgcttcccggccctgctgcagggagctcaaaatggaggacgcggcgctcgggagagcgggcgggtgagtcacccacacaaaggaaaagggcctttccgtcctcagccgtcgcttcatgtgactccacggagtaccgggcgccgtccaggcacctcgattagttctcgagcttttggagtacgtcgtctttaggttggggggaggggttttatgcgatggagtttccccacactgagtgggtggagactgaagttaggccagcttggcacttgatgtaattctccttggaatttgccctttttgagtttggatcttggttcattctcaagcctcagacagtggttcaaagtttttttcttccatttcaggtgtcgtgacgctagcgctaccggactcaatctcgagctcaagcttcgaattctgcagtcgacggtaccgcgggcccgggatccaccggtcgccaccatggtgagcaagggcgaggagctgttcaccggggtggtgcccatcctggtcgagctggacggcgacgtaaacggccacaagttcagcgtgtccggcgagggcgagggcgatgccacctacggcaagctgaccctgaagttcatctgcaccaccggcaagctgcccgtgccctggcccaccctcgtgaccaccctgacctacggcgtgcagtgcttcagccgctaccccgaccacatgaagcagcacgacttcttcaagtccgccatgcccgaaggctacgtccaggagcgcaccatcttcttcaaggacgacggcaactacaagacccgcgccgaggtgaagttcgagggcgacaccctggtgaaccgcatcgagctgaagggcatcgacttcaaggaggacggcaacatcctggggcacaagctggagtacaactacaacagccacaacgtctatatcatggccgacaagcagaagaacggcatcaaggtgaacttcaagatccgccacaacatcgaggacggcagcgtgcagctcgccgaccactaccagcagaacacccccatcggcgacggccccgtgctgctgcccgacaaccactacctgagcacccagtccgccctgagcaaagaccccaacgagaagcgcgatcacatggtcctgctggagttcgtgaccgccgccgggatcactctcggcatggacgagctgtacaagtaatagcggccgcgactctagatcataatcagccataccacatttgtagaggttttacttgctttaaaaaacctcccacacctccccctgaacctgaaacataaaatgaatgcaattgttgttgttaacttgtttattgcagcttataatggttacaaataaagcaatagcatcacaaatttcacaaataaagcatttttttcactgcattctagttgtggtttgtccaaactcatcaatgtatcttaaggcgttgggaccaccttatattcccagggccggttaatgtggctctggttctgggtacttttatctgtcccctccaccccacagtggggccactagggacaggattggtgacagaaaagccccatccttaggcctcctccttcctagtctcctgatattgggtctaacccccacctcctgttaggcagattccttatctggtgacacacccccatttcctggagccatctctctccttgccagaacctctaaggtttgcttacgatggagccagagaggatcctgggagggagagcttggcagggggtgggagggaagggggggatgcgtgacctgcccggttctcagtggccaccctgcgctaccctctcccagaacctgagctgctctgacgcggccgtctggtgcgtttcactgatcctggtgctgcagcttccttacacttcccaagaggagaagcagtttggaaaaacaaaatcagaataagttggtcctgagttctaactttggctcttcacctttctagtccccaatttatattgttcctccgtgcgtcagttttacctgtgagataaggccagtagccagccccgtcctggcagggctgtggtgaggaggggggtgtccgtgtggaaaactccctttgtgagaatggtgcgtcctaggtgttcaccaggtcgtggccgcctctactccctttctctttctccatccttctttccttaaagagtccccagtgctatctgggacatattcctccgcccagagcagggtcccgcttccctaaggccctgctctgggcttctgggtttgagtccttggcaagcccaggagaggcgctcaggcttccctgtcccccttcctcgtccaccatctcatgcccctggctctcctgccccttccctacaggggttcctggctctgctcttcagactgagccccgttcccctgcatc

SEQ ID NO: 300 - DNA, 4305 bp, synthetic construct
  source 1..4305: mol_type = other DNA
ccctgccctgccctctcctgaacctgagccagctcccatagctcagtctggtctatctgcctggccctggccattgtcactttgcgctgccctcctctcgcccccgagtgcccttgctgtgccgccggaactctgccctctaacgctgccgtctctctcctgagtccggaccactttgagctctactggcttctgcgccgcctctggcccactgtttccccttcccaggcaggtcctgctttctctgacctgcattctctcccctgggcctgtgccgctttctgtctgcagcttgtggcctgggtcacctctacggctggcccagatccttccctgccgcctccttcaggttccgtcttcctccactccctcttccccttgctctctgctgtgttgctgcccaaggatgctctttccggagcacttccttctcggcgctgcaccacgtgatgtcctctgagcggatcctccccgtgtctgggtcctctccgggcatctctcctccctcacccaaccccatgccgtcttcactcgctgggttcccttttccttctccttctggggcctgtgccatctctcgtttcttaggatggccttctccgacggatgtctcccttgcgtcccgcctccccttcttgtaggcctgcatcatcaccgtttttctggacaaccccaaagtaccccgtctccctggctttagccacctctccatcctcttgctttctttgcctggacaccccgttctcctgtggattcgggtcacctctcactcctttcatttgggcagctcccctaccccccttacctctctagtctgtgctagctcttccagccccctgtcatggcatcttccaggggtccgagagctcagctagtcttcttcctccaacccgggcccctatgtccacttcaggacagcatgtttgctgcctccagggatcctgtgtccctagttattaatgagtaattcatacaaaaggactcgcccctgccttggggaatcccagggaccgtcgttaaactcccactaacgtagaacccagagatcgctgcgttcccgccccctcacccgcccgctctcgtcatcactgaggtggagaagagcatgcgtgaggctccggtgcccgtcagtgggcagagcgcacatcgcccacagtccccgagaagttggggggaggggtcggcaattgaaccggtgcctagagaaggtggcgcggggtaaactgggaaagtgatgtcgtgtactggctccgcctttttcccgagggtgggggagaaccgtatataagtgcagtagtcgccgtgaacgttctttttcgcaacgggtttgccgccagaacacaggtaagtgccgtgtgtggttcccgcgggcctggcctctttacgggttatggcccttgcgtgccttgaattacttccacgcccctggctgcagtacgtgattcttgatcccgagcttcgggttggaagtgggtgggagagttcgaggccttgcgcttaaggagccccttcgcctcgtgcttgagttgaggcctggcttgggcgctggggccgccgcgtgcgaatctggtggcaccttcgcgcctgtctcgctgctttcgataagtctctagccatttaaaatttttgatgacctgctgcgacgctttttttctggcaagatagtcttgtaaatgcgggccaacatctgcacactggtatttcggtttttggggccgcgggcggcgacggggcccgtgcgtcccagcgcacatgttcggcgaggcggggcctgcgagcgcggccaccgagaatcggacgggggtagtctcaagctggccggcctgctctggtgcctggcctcgcgccgccgtgtatcgccccgccctgggcggcaaggctggcccggtcggcaccagttgcgtgagcggaaagatggccgcttcccggccctgctgcagggagctcaaaatggaggacgcggcgctcgggagagcgggcgggtgagtcacccacacaaaggaaaagggcctttccgtcctcagccgtcgcttcatgtgactccacggagtaccgggcgccgtccaggcacctcgattagttctcgagcttttggagtacgtcgtctttaggttggggggaggggttttatgcgatggagtttccccacactgagtgggtggagactgaagttaggccagcttggcacttgatgtaattctccttggaatttgccctttttgagtttggatcttggttcattctcaagcctcagacagtggttcaaagtttttttcttccatttcaggtgtcgtgacgctagcgctaccggactcaatctcgagctcaagcttcgaattctgcagtcgacggtaccgcgggcccgggatccaccggtcgccaccatggtgagcaagggcgaggagctgttcaccggggtggtgcccatcctggtcgagctggacggcgacgtaaacggccacaagttcagcgtgtccggcgagggcgagggcgatgccacctacggcaagctgaccctgaagttcatctgcaccaccggcaagctgcccgtgccctggcccaccctcgtgaccaccctgacctacggcgtgcagtgcttcagccgctaccccgaccacatgaagcagcacgacttcttcaagtccgccatgcccgaaggctacgtccaggagcgcaccatcttcttcaaggacgacggcaactacaagacccgcgccgaggtgaagttcgagggcgacaccctggtgaaccgcatcgagctgaagggcatcgacttcaaggaggacggcaacatcctggggcacaagctggagtacaactacaacagccacaacgtctatatcatggccgacaagcagaagaacggcatcaaggtgaacttcaagatccgccacaacatcgaggacggcagcgtgcagctcgccgaccactaccagcagaacacccccatcggcgacggccccgtgctgctgcccgacaaccactacctgagcacccagtccgccctgagcaaagaccccaacgagaagcgcgatcacatggtcctgctggagttcgtgaccgccgccgggatcactctcggcatggacgagctgtacaagtaatagcggccgcgactctagatcataatcagccataccacatttgtagaggttttacttgctttaaaaaacctcccacacctccccctgaacctgaaacataaaatgaatgcaattgttgttgttaacttgtttattgcagcttataatggttacaaataaagcaatagcatcacaaatttcacaaataaagcatttttttcactgcattctagttgtggtttgtccaaactcatcaatgtatcttaaggcgtagaaaagccccatccttaggcctcctccttcctagtctcctgatattgggtctaacccccacctcctgttaggcagattccttatctggtgacacacccccatttcctggagccatctctctccttgccagaacctctaaggtttgcttacgatggagccagagaggatcctgggagggagagcttggcagggggtgggagggaagggggggatgcgtgacctgcccggttctcagtggccaccctgcgctaccctctcccagaacctgagctgctctgacgcggccgtctggtgcgtttcactgatcctggtgctgcagcttccttacacttcccaagaggagaagcagtttggaaaaacaaaatcagaataagttggtcctgagttctaactttggctcttcacctttctagtccccaatttatattgttcctccgtgcgtcagttttacctgtgagataaggccagtagccagccccgtcctggcagggctgtggtgaggaggggggtgtccgtgtggaaaactccctttgtgagaatggtgcgtcctaggtgttcaccaggtcgtggccgcctctactccctttctctttctccatccttctttccttaaagagtccccagtgctatctgggacatattcctccgcccagagcagggtcccgcttccctaaggccctgctctgggcttctgggtttgagtccttggcaagcccaggagaggcgctcaggcttccctgtcccccttcctcgtccaccatctcatgcccctggctctcctgccccttccctacaggggttcctggctctgctcttcagactgagccccgttcccctgcatccccgttcccctgcatcccccttcccctgcatcccccagaggccccaggccacctacttggcctggaccccacgagaggccaccccagccctgtctaccaggctgcct

SEQ ID NO: 301 - DNA, 4305 bp, synthetic construct
  source 1..4305: mol_type = other DNA
taacgctgccgtctctctcctgagtccggaccactttgagctctactggcttctgcgccgcctctggcccactgtttccccttcccaggcaggtcctgctttctctgacctgcattctctcccctgggcctgtgccgctttctgtctgcagcttgtggcctgggtcacctctacggctggcccagatccttccctgccgcctccttcaggttccgtcttcctccactccctcttccccttgctctctgctgtgttgctgcccaaggatgctctttccggagcacttccttctcggcgctgcaccacgtgatgtcctctgagcggatcctccccgtgtctgggtcctctccgggcatctctcctccctcacccaaccccatgccgtcttcactcgctgggttcccttttccttctccttctggggcctgtgccatctctcgtttcttaggatggccttctccgacggatgtctcccttgcgtcccgcctccccttcttgtaggcctgcatcatcaccgtttttctggacaaccccaaagtaccccgtctccctggctttagccacctctccatcctcttgctttctttgcctggacaccccgttctcctgtggattcgggtcacctctcactcctttcatttgggcagctcccctaccccccttacctctctagtctgtgctagctcttccagccccctgtcatggcatcttccaggggtccgagagctcagctagtcttcttcctccaacccgggcccctatgtccacttcaggacagcatgtttgctgcctccagggatcctgtgtccccgagctgggaccaccttatattcccagggccggttaatgtggctctggttctgggtacttttatctgtcccctccaccccacagtggggccactagggacaggattggtgacagaaaagccccatccttaggcctcctcctagttattaatgagtaattcatacaaaaggactcgcccctgccttggggaatcccagggaccgtcgttaaactcccactaacgtagaacccagagatcgctgcgttcccgccccctcacccgcccgctctcgtcatcactgaggtggagaagagcatgcgtgaggctccggtgcccgtcagtgggcagagcgcacatcgcccacagtccccgagaagttggggggaggggtcggcaattgaaccggtgcctagagaaggtggcgcggggtaaactgggaaagtgatgtcgtgtactggctccgcctttttcccgagggtgggggagaaccgtatataagtgcagtagtcgccgtgaacgttctttttcgcaacgggtttgccgccagaacacaggtaagtgccgtgtgtggttcccgcgggcctggcctctttacgggttatggcccttgcgtgccttgaattacttccacgcccctggctgcagtacgtgattcttgatcccgagcttcgggttggaagtgggtgggagagttcgaggccttgcgcttaaggagccccttcgcctcgtgcttgagttgaggcctggcttgggcgctggggccgccgcgtgcgaatctggtggcaccttcgcgcctgtctcgctgctttcgataagtctctagccatttaaaatttttgatgacctgctgcgacgctttttttctggcaagatagtcttgtaaatgcgggccaacatctgcacactggtatttcggtttttggggccgcgggcggcgacggggcccgtgcgtcccagcgcacatgttcggcgaggcggggcctgcgagcgcggccaccgagaatcggacgggggtagtctcaagctggccggcctgctctggtgcctggcctcgcgccgccgtgtatcgccccgccctgggcggcaaggctggcccggtcggcaccagttgcgtgagcggaaagatggccgcttcccggccctgctgcagggagctcaaaatggaggacgcggcgctcgggagagcgggcgggtgagtcacccacacaaaggaaaagggcctttccgtcctcagccgtcgcttcatgtgactccacggagtaccgggcgccgtccaggcacctcgattagttctcgagcttttggagtacgtcgtctttaggttggggggaggggttttatgcgatggagtttccccacactgagtgggtggagactgaagttaggccagcttggcacttgatgtaattctccttggaatttgccctttttgagtttggatcttggttcattctcaagcctcagacagtggttcaaagtttttttcttccatttcaggtgtcgtgacgctagcgctaccggactcaatctcgagctcaagcttcgaattctgcagtcgacggtaccgcgggcccgggatccaccggtcgccaccatggtgagcaagggcgaggagctgttcaccggggtggtgcccatcctggtcgagctggacggcgacgtaaacggccacaagttcagcgtgtccggcgagggcgagggcgatgccacctacggcaagctgaccctgaagttcatctgcaccaccggcaagctgcccgtgccctggcccaccctcgtgaccaccctgacctacggcgtgcagtgcttcagccgctaccccgaccacatgaagcagcacgacttcttcaagtccgccatgcccgaaggctacgtccaggagcgcaccatcttcttcaaggacgacggcaactacaagacccgcgccgaggtgaagttcgagggcgacaccctggtgaaccgcatcgagctgaagggcatcgacttcaaggaggacggcaacatcctggggcacaagctggagtacaactacaacagccacaacgtctatatcatggccgacaagcagaagaacggcatcaaggtgaacttcaagatccgccacaacatcgaggacggcagcgtgcagctcgccgaccactaccagcagaacacccccatcggcgacggccccgtgctgctgcccgacaaccactacctgagcacccagtccgccctgagcaaagaccccaacgagaagcgcgatcacatggtcctgctggagttcgtgaccgccgccgggatcactctcggcatggacgagctgtacaagtaatagcggccgcgactctagatcataatcagccataccacatttgtagaggttttacttgctttaaaaaacctcccacacctccccctgaacctgaaacataaaatgaatgcaattgttgttgttaacttgtttattgcagcttataatggttacaaataaagcaatagcatcacaaatttcacaaataaagcatttttttcactgcattctagttgtggtttgtccaaactcatcaatgtatcttaaggcgttacgatggagccagagaggatcctgggagggagagcttggcagggggtgggagggaagggggggatgcgtgacctgcccggttctcagtggccaccctgcgctaccctctcccagaacctgagctgctctgacgcggccgtctggtgcgtttcactgatcctggtgctgcagcttccttacacttcccaagaggagaagcagtttggaaaaacaaaatcagaataagttggtcctgagttctaactttggctcttcacctttctagtccccaatttatattgttcctccgtgcgtcagttttacctgtgagataaggccagtagccagccccgtcctggcagggctgtggtgaggaggggggtgtccgtgtggaaaactccctttgtgagaatggtgcgtcctaggtgttcaccaggtcgtggccgcctctactccctttctctttctccatccttctttccttaaagagtccccagtgctatctgggacatattcctccgcccagagcagggtcccgcttccctaaggccctgctctgggcttctgggtttgagtccttggcaagcccaggagaggcgctcaggcttccctgtcccccttcctcgtccaccatctcatgcccctggctctcctgccccttccctacaggggttcctggctctgctcttcagactgagccccgttcccctgcatccccgttcccctgcatcccccttcccctgcatcccccagaggccccaggccacctacttggcctggaccccacgagaggccaccccagccctgtctaccaggctgccttttgggtggattctcctccaactgtggggtgactgcttggcaaactcactcttcggggtatcccaggaggcctggagcattggggtgggctggggttcagagaggagggattcccttctcaggttacgtggccaagaagcaggggagc

SEQ ID NO: 302 - DNA, 4305 bp, synthetic construct
  source 1..4305: mol_type = other DNA
gtttccccttcccaggcaggtcctgctttctctgacctgcattctctcccctgggcctgtgccgctttctgtctgcagcttgtggcctgggtcacctctacggctggcccagatccttccctgccgcctccttcaggttccgtcttcctccactccctcttccccttgctctctgctgtgttgctgcccaaggatgctctttccggagcacttccttctcggcgctgcaccacgtgatgtcctctgagcggatcctccccgtgtctgggtcctctccgggcatctctcctccctcacccaaccccatgccgtcttcactcgctgggttcccttttccttctccttctggggcctgtgccatctctcgtttcttaggatggccttctccgacggatgtctcccttgcgtcccgcctccccttcttgtaggcctgcatcatcaccgtttttctggacaaccccaaagtaccccgtctccctggctttagccacctctccatcctcttgctttctttgcctggacaccccgttctcctgtggattcgggtcacctctcactcctttcatttgggcagctcccctaccccccttacctctctagtctgtgctagctcttccagccccctgtcatggcatcttccaggggtccgagagctcagctagtcttcttcctccaacccgggcccctatgtccacttcaggacagcatgtttgctgcctccagggatcctgtgtccccgagctgggaccaccttatattcccagggccggttaatgtggctctggttctgggtacttttatctgtcccctccaccccacagtggggccactagggacaggattggtgacagaaaagccccatccttaggcctcctccttcctagtctcctgatattgggtctaacccccacctcctgttaggcagattccttatctggtgacacaccccctagttattaatgagtaattcatacaaaaggactcgcccctgccttggggaatcccagggaccgtcgttaaactcccactaacgtagaacccagagatcgctgcgttcccgccccctcacccgcccgctctcgtcatcactgaggtggagaagagcatgcgtgaggctccggtgcccgtcagtgggcagagcgcacatcgcccacagtccccgagaagttggggggaggggtcggcaattgaaccggtgcctagagaaggtggcgcggggtaaactgggaaagtgatgtcgtgtactggctccgcctttttcccgagggtgggggagaaccgtatataagtgcagtagtcgccgtgaacgttctttttcgcaacgggtttgccgccagaacacaggtaagtgccgtgtgtggttcccgcgggcctggcctctttacgggttatggcccttgcgtgccttgaattacttccacgcccctggctgcagtacgtgattcttgatcccgagcttcgggttggaagtgggtgggagagttcgaggccttgcgcttaaggagccccttcgcctcgtgcttgagttgaggcctggcttgggcgctggggccgccgcgtgcgaatctggtggcaccttcgcgcctgtctcgctgctttcgataagtctctagccatttaaaatttttgatgacctgctgcgacgctttttttctggcaagatagtcttgtaaatgcgggccaacatctgcacactggtatttcggtttttggggccgcgggcggcgacggggcccgtgcgtcccagcgcacatgttcggcgaggcggggcctgcgagcgcggccaccgagaatcggacgggggtagtctcaagctggccggcctgctctggtgcctggcctcgcgccgccgtgtatcgccccgccctgggcggcaaggctggcccggtcggcaccagttgcgtgagcggaaagatggccgcttcccggccctgctgcagggagctcaaaatggaggacgcggcgctcgggagagcgggcgggtgagtcacccacacaaaggaaaagggcctttccgtcctcagccgtcgcttcatgtgactccacggagtaccgggcgccgtccaggcacctcgattagttctcgagcttttggagtacgtcgtctttaggttggggggaggggttttatgcgatggagtttccccacactgagtgggtggagactgaagttaggccagcttggcacttgatgtaattctccttggaatttgccctttttgagtttggatcttggttcattctcaagcctcagacagtggttcaaagtttttttcttccatttcaggtgtcgtgacgctagcgctaccggactcaatctcgagctcaagcttcgaattctgcagtcgacggtaccgcgggcccgggatccaccggtcgccaccatggtgagcaagggcgaggagctgttcaccggggtggtgcccatcctggtcgagctggacggcgacgtaaacggccacaagttcagcgtgtccggcgagggcgagggcgatgccacctacggcaagctgaccctgaagttcatctgcaccaccggcaagctgcccgtgccctggcccaccctcgtgaccaccctgacctacggcgtgcagtgcttcagccgctaccccgaccacatgaagcagcacgacttcttcaagtccgccatgcccgaaggctacgtccaggagcgcaccatcttcttcaaggacgacggcaactacaagacccgcgccgaggtgaagttcgagggcgacaccctggtgaaccgcatcgagctgaagggcatcgacttcaaggaggacggcaacatcctggggcacaagctggagtacaactacaacagccacaacgtctatatcatggccgacaagcagaagaacggcatcaaggtgaacttcaagatccgccacaacatcgaggacggcagcgtgcagctcgccgaccactaccagcagaacacccccatcggcgacggccccgtgctgctgcccgacaaccactacctgagcacccagtccgccctgagcaaagaccccaacgagaagcgcgatcacatggtcctgctggagttcgtgaccgccgccgggatcactctcggcatggacgagctgtacaagtaatagcggccgcgactctagatcataatcagccataccacatttgtagaggttttacttgctttaaaaaacctcccacacctccccctgaacctgaaacataaaatgaatgcaattgttgttgttaacttgtttattgcagcttataatggttacaaataaagcaatagcatcacaaatttcacaaataaagcatttttttcactgcattctagttgtggtttgtccaaactcatcaatgtatcttaaggcgtcggttctcagtggccaccctgcgctaccctctcccagaacctgagctgctctgacgcggccgtctggtgcgtttcactgatcctggtgctgcagcttccttacacttcccaagaggagaagcagtttggaaaaacaaaatcagaataagttggtcctgagttctaactttggctcttcacctttctagtccccaatttatattgttcctccgtgcgtcagttttacctgtgagataaggccagtagccagccccgtcctggcagggctgtggtgaggaggggggtgtccgtgtggaaaactccctttgtgagaatggtgcgtcctaggtgttcaccaggtcgtggccgcctctactccctttctctttctccatccttctttccttaaagagtccccagtgctatctgggacatattcctccgcccagagcagggtcccgcttccctaaggccctgctctgggcttctgggtttgagtccttggcaagcccaggagaggcgctcaggcttccctgtcccccttcctcgtccaccatctcatgcccctggctctcctgccccttccctacaggggttcctggctctgctcttcagactgagccccgttcccctgcatccccgttcccctgcatcccccttcccctgcatcccccagaggccccaggccacctacttggcctggaccccacgagaggccaccccagccctgtctaccaggctgccttttgggtggattctcctccaactgtggggtgactgcttggcaaactcactcttcggggtatcccaggaggcctggagcattggggtgggctggggttcagagaggagggattcccttctcaggttacgtggccaagaagcaggggagctgggtttgggtcaggtctgggtgtggggtgaccagcttatgctgtttgcccaggacagcctagttttagcactgaaac

SEQ ID NO: 303 - DNA, 4271 bp, synthetic construct
  source 1..4271: mol_type = other DNA
actagtccgcgggcggccgcgctgccctcctctcgcccccgagtgcccttgctgtgccgccggaactctgccctctaacgctgccgtctctctcctgagtccggaccactttgagctctactggcttctgcgccgcctctggcccactgtttccccttcccaggcaggtcctgctttctctgacctgcattctctcccctgggcctgtgccgctttctgtctgcagcttgtggcctgggtcacctctacggctggcccagatccttccctgccgcctccttcaggttccgtcttcctccactccctcttccccttgctctctgctgtgttgctgcccaaggatgctctttccggagcacttccttctcggcgctgcaccacgtgatgtcctctgagcggatcctccccgtgtctgggtcctctccgggcatctctcctccctcacccaaccccatgccgtcttcactcgctgggttcccttttccttctccttctggggcctgtgccatctctcgtttcttaggatggccttctccgacggatgtctcccttgcgtcccgcctccccttcttgtaggcctgcatcatcaccgtttttctggacaaccccaaagtaccccgtctccctggctttagccacctctccatcctcttgctttctttgcctggacaccccgttctcctgtggattcgggtcacctctcactcctttcatttgggcagctcccctaccccccttacctctctagtctgtgctagctcttccagccccctgtcatggcatcttccaggggtccgagagctcagctagtcttcttcctccaacccgggcccctatgtccacttcaggacagcatgtttgctgcctccagggatcctgtgtccccgagctgggaccaccttatattcccagggccggttaatgtggctctggttctgggtacttttatctgtcccctccaccccacagttagttattaatgagtaattcatacaaaaggactcgcccctgccttggggaatcccagggaccgtcgttaaactcccactaacgtagaacccagagatcgctgcgttcccgccccctcacccgcccgctctcgtcatcactgaggtggagaagagcatgcgtgaggctccggtgcccgtcagtgggcagagcgcacatcgcccacagtccccgagaagttggggggaggggtcggcaattgaaccggtgcctagagaaggtggcgcggggtaaactgggaaagtgatgtcgtgtactggctccgcctttttcccgagggtgggggagaaccgtatataagtgcagtagtcgccgtgaacgttctttttcgcaacgggtttgccgccagaacacaggtaagtgccgtgtgtggttcccgcgggcctggcctctttacgggttatggcccttgcgtgccttgaattacttccacgcccctggctgcagtacgtgattcttgatcccgagcttcgggttggaagtgggtgggagagttcgaggccttgcgcttaaggagccccttcgcctcgtgcttgagttgaggcctggcttgggcgctggggccgccgcgtgcgaatctggtggcaccttcgcgcctgtctcgctgctttcgataagtctctagccatttaaaatttttgatgacctgctgcgacgctttttttctggcaagatagtcttgtaaatgcgggccaacatctgcacactggtatttcggtttttggggccgcgggcggcgacggggcccgtgcgtcccagcgcacatgttcggcgaggcggggcctgcgagcgcggccaccgagaatcggacgggggtagtctcaagctggccggcctgctctggtgcctggcctcgcgccgccgtgtatcgccccgccctgggcggcaaggctggcccggtcggcaccagttgcgtgagcggaaagatggccgcttcccggccctgctgcagggagctcaaaatggaggacgcggcgctcgggagagcgggcgggtgagtcacccacacaaaggaaaagggcctttccgtcctcagccgtcgcttcatgtgactccacggagtaccgggcgccgtccaggcacctcgattagttctcgagcttttggagtacgtcgtctttaggttggggggaggggttttatgcgatggagtttccccacactgagtgggtggagactgaagttaggccagcttggcacttgatgtaattctccttggaatttgccctttttgagtttggatcttggttcattctcaagcctcagacagtggttcaaagtttttttcttccatttcaggtgtcgtgacaccggtcgccaccatggtgagcaagggcgaggagctgttcaccggggtggtgcccatcctggtcgagctggacggcgacgtaaacggccacaagttcagcgtgtccggcgagggcgagggcgatgccacctacggcaagctgaccctgaagttcatctgcaccaccggcaagctgcccgtgccctggcccaccctcgtgaccaccctgacctacggcgtgcagtgcttcagccgctaccccgaccacatgaagcagcacgacttcttcaagtccgccatgcccgaaggctacgtccaggagcgcaccatcttcttcaaggacgacggcaactacaagacccgcgccgaggtgaagttcgagggcgacaccctggtgaaccgcatcgagctgaagggcatcgacttcaaggaggacggcaacatcctggggcacaagctggagtacaactacaacagccacaacgtctatatcatggccgacaagcagaagaacggcatcaaggtgaacttcaagatccgccacaacatcgaggacggcagcgtgcagctcgccgaccactaccagcagaacacccccatcggcgacggccccgtgctgctgcccgacaaccactacctgagcacccagtccgccctgagcaaagaccccaacgagaagcgcgatcacatggtcctgctggagttcgtgaccgccgccgggatcactctcggcatggacgagctgtacaagtaatagcggccgcgactctagatcataatcagccataccacatttgtagaggttttacttgctttaaaaaacctcccacacctccccctgaacctgaaacataaaatgaatgcaattgttgttgttaacttgtttattgcagcttataatggttacaaataaagcaatagcatcacaaatttcacaaataaagcatttttttcactgcattctagttgtggtttgtccaaactcatcaatgtatcttaaggcgttttcctggagccatctctctccttgccagaacctctaaggtttgcttacgatggagccagagaggatcctgggagggagagcttggcagggggtgggagggaagggggggatgcgtgacctgcccggttctcagtggccaccctgcgctaccctctcccagaacctgagctgctctgacgcggccgtctggtgcgtttcactgatcctggtgctgcagcttccttacacttcccaagaggagaagcagtttggaaaaacaaaatcagaataagttggtcctgagttctaactttggctcttcacctttctagtccccaatttatattgttcctccgtgcgtcagttttacctgtgagataaggccagtagccagccccgtcctggcagggctgtggtgaggaggggggtgtccgtgtggaaaactccctttgtgagaatggtgcgtcctaggtgttcaccaggtcgtggccgcctctactccctttctctttctccatccttctttccttaaagagtccccagtgctatctgggacatattcctccgcccagagcagggtcccgcttccctaaggccctgctctgggcttctgggtttgagtccttggcaagcccaggagaggcgctcaggcttccctgtcccccttcctcgtccaccatctcatgcccctggctctcctgccccttccctacaggggttcctggctctgctcttcagactgagccccgttcccctgcatccccgttcccctgcatcccccttcccctgcatcccccagaggccccaggccacctacttggcctggaccccacgagaggccaccccagccctgtctaccaggctgccttttgggtggattctcctccaactgtggggtgactgcttggcaaactcactcttcggggtatcccaggaggcctggagcattggggtgggctggggttcagaggcggccgcccgcggactagt

SEQ ID NO: 304 - DNA, 3954 bp, synthetic construct
  source 1..3954: mol_type = other DNA
ttggccactccctctctgcgcgctcgctcgctcactgaggccgggcgaccaaaggtcgcccgacgcccgggctttgcccgggcggcctcagtgagcgagcgagcgcgcagagagggagtggccaactccatcactaggggttcctagatctctataacttcgtatagcatacattatacgaagttatatgtatgctaggtcagtgaagagaagaacaaaaagcagcatattacagttagttgtcttcatcaatctttaaatatgttgtgtggtttttctctccctgtttccacagtttttcttgatcatgaaaacgccaacaaaattctgaatcggccaaagaggtataattcaggtaaattggaagagtttgttcaagggaaccttgagagagaatgtatggaagaaaagtgtagttttgaagaagcagtattcactttggaggactttgtcggtgactggaggcaaaccgctggttataatctcgaccaagtactggaacagggcggggtaagttccctctttcagaatttgggtgtaagcgtcacaccaatccagcggattgtgttgtctggagagaacggactcaaaattgacatccatgttatcattccatatgaaggtctcagtggagaccaaatggggcagatcgagaagattttcaaggtagtttacccagtcgacgatcaccacttcaaagtcattctccactatggcacacttgttatcgacggagtaactcctaatatgattgattactttggtcgcccgtatgagggcatcgcagtgtttgatggcaaaaagatcaccgtaacaggaacgttgtggaatgggaacaagataatcgacgagagattgataaatccagacgggtcactcctgttcagggttacaattaacggcgtcacaggatggagactctgtgaacgaatactggccacaaatttttcactcctgaagcaggccggagacgtggaggaaaacccagggcccgtgagcaagggcgaggagctgttcaccggggtggtgcccatcctggtcgagctggacggcgacgtaaacggccacaagttcagcgtgtccggcgagggcgagggcgatgccacctacggcaagctgaccctgaagttcatctgcaccaccggcaagctgcccgtgccctggcccaccctcgtgaccaccctgacctacggcgtgcagtgcttcagccgctaccccgaccacatgaagcagcacgacttcttcaagtccgccatgcccgaaggctacgtccaggagcgcaccatcttcttcaaggacgacggcaactacaagacccgcgccgaggtgaagttcgagggcgacaccctggtgaaccgcatcgagctgaagggcatcgacttcaaggaggacggcaacatcctggggcacaagctggagtacaactacaacagccacaacgtctatatcatggccgacaagcagaagaacggcatcaaggtgaacttcaagatccgccacaacatcgaggacggcagcgtgcagctcgccgaccactaccagcagaacacccccatcggcgacggccccgtgctgctgcccgacaaccactacctgagcacccagtccgccctgagcaaagaccccaacgagaagcgcgatcacatggtcctgctggagttcgtgaccgccgccgggatcactctcggcatggacgagctgtacaagggaggaggaagcccgaagaagaagagaaaggtctaacctcgactgtgccttctagttgccagccatctgttgtttgcccctcccccgtgccttccttgaccctggaaggtgccactcccactgtcctttcctaataaaatgaggaaattgcatcgcattgtctgagtaggtgtcattctattctggggggtggggtggggcaggacagcaagggggaggattgggaagacaatagcaggcatgctggggatgcggtgggctctatggcttctgaggcggaaagaaccagctggggctctagggggtatccccaaaaaacctcccacacctccccctgaacctgaaacataaaatgaatgcaattgttgttgttaacttgtttattgcagcttataatggttacaaataaagcaatagcatcacaaatttcacaaataaagcatttttttcactgcattctagttgtggtttgtccaaactcatcaatgtatcttatcatgtctgttacaccttcctcttcttcttggggctgccgccgcccttgtacagctcgtccatgcccagggtgatgccggcggcggtcacgaactccagcagcaccatgtggtccctcttctcgttggggtccttgctcagggcgctctgggtgctcaggtagtggttgtcgggcagcagcacggggccgtcgccgatgggggtgttctgctggtagtggtcggccagctgcacgctgccgtcctcgatgttgtgcctgatcttgaagttcaccttgatgccgttcttctgcttgtcggccatgatgtacacgttgtggctgttgtagttgtactccagcttgtggcccaggatgttgccgtcctccttgaagtcgatgcccttcagctcgatcctgttcaccagggtgtcgccctcgaacttcacctcggccctggtcttgtagttgccgtcgtccttgaagaagatggtcctctcctgcacgtagccctcgggcatggcgctcttgaagaagtcgtgctgcttcatgtggtcggggtacctgctgaagcactgcacgccgtaggtcagggtggtcaccagggtgggccagggcacgggcagcttgccggtggtgcagatgaacttcagggtcagcttgccgtaggtggcgtcgccctcgccctcgccgctcacgctgaacttgtggccgttcacgtcgccgtccagctccaccaggatgggcaccacgccggtgaacagctcctcgcccttgctcacggggccggggttctcctccacgtcgccggcctgcttcagcaggctgaagttggtggccaggatcctctcgcacagcctccagccggtcacgccgttgatggtcaccctgaacagcaggctgccgtcggggttgatcagcctctcgtcgatgatcttgttgccgttccacagggtgccggtcacggtgatcttcttgccgtcgaacacggcgatgccctcgtagggcctgccgaagtagtcgatcatgttgggggtcacgccgtcgatcaccagggtgccgtagtgcaggatcaccttgaagtggtggtcgtccacggggtacaccaccttgaaaatcttctcgatctggcccatctggtcgccgctcaggccctcgtaggggatgatcacgtggatgtcgatcttcaggccgttctcgccgctcagcacgatcctctggatgggggtcacgctcacgcccaggttctggaacaggctgctcacgccgccctgctccagcacctggtccaggttgtagccggcggtctgcctccagtcgcccacgaagtcctccagggtgaacacggcctcctcgaagctgcacttctcctccatgcactccctctccaggttgccctgcacgaactcctccagcttgccgctgttgtacctcttgggcctgttcaggatcttgttggcgttctcgtggtccaggaaaactgtggaaacagggagagaaaaaccacacaacatatttaaagattgatgaagacaactaactgtaatatgctgctttttgttcttctcttcactgacctaatgtatgcataacttcgtatagcatacattatacgaagttatagagatctaggaacccctagtgatggagttggccactccctctctgcgcgctcgctcgctcactgaggccgcccgggcaaagcccgggcgtcgggcgacctttggtcgcccggcctcagtgagcgagcgagcgcgcagagagggagtggccaa

SEQ ID NO: 305 - RNA, 4782 nt, synthetic construct; identical to SEQ ID NO: 2
  source 1..4782: mol_type = other RNA

SEQ ID NO: 306 - DNA, 4782 bp, synthetic construct
  source 1..4782: mol_type = other DNA
atggaggcctcccccgcctccggcccccggcacctgatggacccccacatcttcacctccaacttcaacaacggcatcggccggcacaagacctacctgtgctacgaggtggagcggctggacaacggcacctccgtgaagatggaccagcaccggggcttcctgcacaaccaggccaagaacctgctgtgcggcttctacggccggcacgccgagctgcggttcctggacctggtgccctccctgcagctggaccccgcccagatctaccgggtgacctggttcatctcctggtccccctgcttctcctggggctgcgccggcgaggtgcgggccttcctgcaggagaacacccacgtgcggctgcggatcttcgccgcccggatctacgactacgaccccctgtacaaggaggccctgcagatgctgcgggacgccggcgcccaggtgtccatcatgacctacgacgagttcaagcactgctgggacaccttcgtggaccaccagggctgccccttccagccctgggacggcctggacgagcactcccaggccctgtccggccggctgcgggccatcctgcagaaccagggcaactccggctccgagacccccggcacctccgagtccgccacccccgagtccgacaagaagtactccatcggcctggccatcggcaccaactccgtgggctgggccgtgatcaccgacgagtacaaggtgccctccaagaagttcaaggtgctgggcaacaccgaccggcactccatcaagaagaacctgatcggcgccctgctgttcgactccggcgagaccgccgaggccacccggctgaagcggaccgcccggcggcggtacacccggcggaagaaccggatctgctacctgcaggagatcttctccaacgagatggccaaggtggacgactccttcttccaccggctggaggagtccttcctggtggaggaggacaagaagcacgagcggcaccccatcttcggcaacatcgtggacgaggtggcctaccacgagaagtaccccaccatctaccacctgcggaagaagctggtggactccaccgacaaggccgacctgcggctgatctacctggccctggcccacatgatcaagttccggggccacttcctgatcgagggcgacctgaaccccgacaactccgacgtggacaagctgttcatccagctggtgcagacctacaaccagctgttcgaggagaaccccatcaacgcctccggcgtggacgccaaggccatcctgtccgcccggctgtccaagtcccggcggctggagaacctgatcgcccagctgcccggcgagaagaagaacggcctgttcggcaacctgatcgccctgtccctgggcctgacccccaacttcaagtccaacttcgacctggccgaggacgccaagctgcagctgtccaaggacacctacgacgacgacctggacaacctgctggcccagatcggcgaccagtacgccgacctgttcctggccgccaagaacctgtccgacgccatcctgctgtccgacatcctgcgggtgaacaccgagatcaccaaggcccccctgtccgcctccatgatcaagcggtacgacgagcaccaccaggacctgaccctgctgaaggccctggtgcggcagcagctgcccgagaagtacaaggagatcttcttcgaccagtccaagaacggctacgccggctacatcgacggcggcgcctcccaggaggagttctacaagttcatcaagcccatcctggagaagatggacggcaccgaggagctgctggtgaagctgaaccgggaggacctgctgcggaagcagcggaccttcgacaacggctccatcccccaccagatccacctgggcgagctgcacgccatcctgcggcggcaggaggacttctaccccttcctgaaggacaaccgggagaagatcgagaagatcctgaccttccggatcccctactacgtgggccccctggcccggggcaactcccggttcgcctggatgacccggaagtccgaggagaccatcaccccctggaacttcgaggaggtggtggacaagggcgcctccgcccagtccttcatcgagcggatgaccaacttcgacaagaacctgcccaacgagaaggtgctgcccaagcactccctgctgtacgagtacttcaccgtgtacaacgagctgaccaaggtgaagtacgtgaccgagggcatgcggaagcccgccttcctgtccggcgagcagaagaaggccatcgtggacctgctgttcaagaccaaccggaaggtgaccgtgaagcagctgaaggaggactacttcaagaagatcgagtgcttcgactccgtggagatctccggcgtggaggaccggttcaacgcctccctgggcacctaccacgacctgctgaagatcatcaaggacaaggacttcctggacaacgaggagaacgaggacatcctggaggacatcgtgctgaccctgaccctgttcgaggaccgggagatgatcgaggagcggctgaagacctacgcccacctgttcgacgacaaggtgatgaagcagctgaagcggcggcggtacaccggctggggccggctgtcccggaagctgatcaacggcatccgggacaagcagtccggcaagaccatcctggacttcctgaagtccgacggcttcgccaaccggaacttcatgcagctgatccacgacgactccctgaccttcaaggaggacatccagaaggcccaggtgtccggccagggcgactccctgcacgagcacatcgccaacctggccggctcccccgccatcaagaagggcatcctgcagaccgtgaaggtggtggacgagctggtgaaggtgatgggccggcacaagcccgagaacatcgtgatcgagatggcccgggagaaccagaccacccagaagggccagaagaactcccgggagcggatgaagcggatcgaggagggcatcaaggagctgggctcccagatcctgaaggagcaccccgtggagaacacccagctgcagaacgagaagctgtacctgtactacctgcagaacggccgggacatgtacgtggaccaggagctggacatcaaccggctgtccgactacgacgtggaccacatcgtgccccagtccttcctgaaggacgactccatcgacaacaaggtgctgacccggtccgacaagaaccggggcaagtccgacaacgtgccctccgaggaggtggtgaagaagatgaagaactactggcggcagctgctgaacgccaagctgatcacccagcggaagttcgacaacctgaccaaggccgagcggggcggcctgtccgagctggacaaggccggcttcatcaagcggcagctggtggagacccggcagatcaccaagcacgtggcccagatcctggactcccggatgaacaccaagtacgacgagaacgacaagctgatccgggaggtgaaggtgatcaccctgaagtccaagctggtgtccgacttccggaaggacttccagttctacaaggtgcgggagatcaacaactaccaccacgcccacgacgcctacctgaacgccgtggtgggcaccgccctgatcaagaagtaccccaagctggagtccgagttcgtgtacggcgactacaaggtgtacgacgtgcggaagatgatcgccaagtccgagcaggagatcggcaaggccaccgccaagtacttcttctactccaacatcatgaacttcttcaagaccgagatcaccctggccaacggcgagatccggaagcggcccctgatcgagaccaacggcgagaccggcgagatcgtgtgggacaagggccgggacttcgccaccgtgcggaaggtgctgtccatgccccaggtgaacatcgtgaagaagaccgaggtgcagaccggcggcttctccaaggagtccatcctgcccaagcggaactccgacaagctgatcgcccggaagaaggactgggaccccaagaagtacggcggcttcgactcccccaccgtggcctactccgtgctggtggtggccaaggtggagaagggcaagtccaagaagctgaagtccgtgaaggagctgctgggcatcaccatcatggagcggtcctccttcgagaagaaccccatcgacttcctggaggccaagggctacaaggaggtgaagaaggacctgatcatcaagctgcccaagtactccctgttcgagctggagaacggccggaagcggatgctggcctccgccggcgagctgcagaagggcaacgagctggccctgccctccaagtacgtgaacttcctgtacctggcctcccactacgagaagctgaagggctcccccgaggacaacgagcagaagcagctgttcgtggagcagcacaagcactacctggacgagatcatcgagcagatctccgagttctccaagcgggtgatcctggccgacgccaacctggacaaggtgctgtccgcctacaacaagcaccgggacaagcccatccgggagcaggccgagaacatcatccacctgttcaccctgaccaacctgggcgcccccgccgccttcaagtacttcgacaccaccatcgaccggaagcggtacacctccaccaaggaggtgctggacgccaccctgatccaccagtccatcaccggcctgtacgagacccggatcgacctgtcccagctgggcggcgacggcggcggctcccccaagaagaagcggaaggtgtga

SEQ ID NO: 307 - DNA, 4140 bp, synthetic construct
  source 1..4140: mol_type = other DNA
atggacaagaagtactccatcggcctggacatcggcaccaactccgtgggctgggccgtgatcaccgacgagtacaaggtgccctccaagaagttcaaggtgctgggcaacaccgaccggcactccatcaagaagaacctgatcggcgccctgctgttcgactccggcgagaccgccgaggccacccggctgaagcggaccgcccggcggcggtacacccggcggaagaaccggatctgctacctgcaggagatcttctccaacgagatggccaaggtggacgactccttcttccaccggctggaggagtccttcctggtggaggaggacaagaagcacgagcggcaccccatcttcggcaacatcgtggacgaggtggcctaccacgagaagtaccccaccatctaccacctgcggaagaagctggtggactccaccgacaaggccgacctgcggctgatctacctggccctggcccacatgatcaagttccggggccacttcctgatcgagggcgacctgaaccccgacaactccgacgtggacaagctgttcatccagctggtgcagacctacaaccagctgttcgaggagaaccccatcaacgcctccggcgtggacgccaaggccatcctgtccgcccggctgtccaagtcccggcggctggagaacctgatcgcccagctgcccggcgagaagaagaacggcctgttcggcaacctgatcgccctgtccctgggcctgacccccaacttcaagtccaacttcgacctggccgaggacgccaagctgcagctgtccaaggacacctacgacgacgacctggacaacctgctggcccagatcggcgaccagtacgccgacctgttcctggccgccaagaacctgtccgacgccatcctgctgtccgacatcctgcgggtgaacaccgagatcaccaaggcccccctgtccgcctccatgatcaagcggtacgacgagcaccaccaggacctgaccctgctgaaggccctggtgcggcagcagctgcccgagaagtacaaggagatcttcttcgaccagtccaagaacggctacgccggctacatcgacggcggcgcctcccaggaggagttctacaagttcatcaagcccatcctggagaagatggacggcaccgaggagctgctggtgaagctgaaccgggaggacctgctgcggaagcagcggaccttcgacaacggctccatcccccaccagatccacctgggcgagctgcacgccatcctgcggcggcaggaggacttctaccccttcctgaaggacaaccgggagaagatcgagaagatcctgaccttccggatcccctactacgtgggccccctggcccggggcaactcccggttcgcctggatgacccggaagtccgaggagaccatcaccccctggaacttcgaggaggtggtggacaagggcgcctccgcccagtccttcatcgagcggatgaccaacttcgacaagaacctgcccaacgagaaggtgctgcccaagcactccctgctgtacgagtacttcaccgtgtacaacgagctgaccaaggtgaagtacgtgaccgagggcatgcggaagcccgccttcctgtccggcgagcagaagaaggccatcgtggacctgctgttcaagaccaaccggaaggtgaccgtgaagcagctgaaggaggactacttcaagaagatcgagtgcttcgactccgtggagatctccggcgtggaggaccggttcaacgcctccctgggcacctaccacgacctgctgaagatcatcaaggacaaggacttcctggacaacgaggagaacgaggacatcctggaggacatcgtgctgaccctgaccctgttcgaggaccgggagatgatcgaggagcggctgaagacctacgcccacctgttcgacgacaaggtgatgaagcagctgaagcggcggcggtacaccggctggggccggctgtcccggaagctgatcaacggcatccgggacaagcagtccggcaagaccatcctggacttcctgaagtccgacggcttcgccaaccggaacttcatgcagctgatccacgacgactccctgaccttcaaggaggacatccagaaggcccaggtgtccggccagggcgactccctgcacgagcacatcgccaacctggccggctcccccgccatcaagaagggcatcctgcagaccgtgaaggtggtggacgagctggtgaaggtgatgggccggcacaagcccgagaacatcgtgatcgagatggcccgggagaaccagaccacccagaagggccagaagaactcccgggagcggatgaagcggatcgaggagggcatcaaggagctgggctcccagatcctgaaggagcaccccgtggagaacacccagctgcagaacgagaagctgtacctgtactacctgcagaacggccgggacatgtacgtggaccaggagctggacatcaaccggctgtccgactacgacgtggaccacatcgtgccccagtccttcctgaaggacgactccatcgacaacaaggtgctgacccggtccgacaagaaccggggcaagtccgacaacgtgccctccgaggaggtggtgaagaagatgaagaactactggcggcagctgctgaacgccaagctgatcacccagcggaagttcgacaacctgaccaaggccgagcggggcggcctgtccgagctggacaaggccggcttcatcaagcggcagctggtggagacccggcagatcaccaagcacgtggcccagatcctggactcccggatgaacaccaagtacgacgagaacgacaagctgatccgggaggtgaaggtgatcaccctgaagtccaagctggtgtccgacttccggaaggacttccagttctacaaggtgcgggagatcaacaactaccaccacgcccacgacgcctacctgaacgccgtggtgggcaccgccctgatcaagaagtaccccaagctggagtccgagttcgtgtacggcgactacaaggtgtacgacgtgcggaagatgatcgccaagtccgagcaggagatcggcaaggccaccgccaagtacttcttctactccaacatcatgaacttcttcaagaccgagatcaccctggccaacggcgagatccggaagcggcccctgatcgagaccaacggcgagaccggcgagatcgtgtgggacaagggccgggacttcgccaccgtgcggaaggtgctgtccatgccccaggtgaacatcgtgaagaagaccgaggtgcagaccggcggcttctccaaggagtccatcctgcccaagcggaactccgacaagctgatcgcccggaagaaggactgggaccccaagaagtacggcggcttcgactcccccaccgtggcctactccgtgctggtggtggccaaggtggagaagggcaagtccaagaagctgaagtccgtgaaggagctgctgggcatcaccatcatggagcggtcctccttcgagaagaaccccatcgacttcctggaggccaagggctacaaggaggtgaagaaggacctgatcatcaagctgcccaagtactccctgttcgagctggagaacggccggaagcggatgctggcctccgccggcgagctgcagaagggcaacgagctggccctgccctccaagtacgtgaacttcctgtacctggcctcccactacgagaagctgaagggctcccccgaggacaacgagcagaagcagctgttcgtggagcagcacaagcactacctggacgagatcatcgagcagatctccgagttctccaagcgggtgatcctggccgacgccaacctggacaaggtgctgtccgcctacaacaagcaccgggacaagcccatccgggagcaggccgagaacatcatccacctgttcaccctgaccaacctgggcgcccccgccgccttcaagtacttcgacaccaccatcgaccggaagcggtacacctccaccaaggaggtgctggacgccaccctgatccaccagtccatcaccggcctgtacgagacccggatcgacctgtcccagctgggcggcgacggcggcggctcccccaagaagaagcggaaggtgtga

SEQ ID NO: 308 - RNA, 4005 nt, synthetic construct; identical to SEQ ID NO: 144
  source 1..4005: mol_type = other RNA

SEQ ID NO: 309 - RNA, 327 nt, synthetic construct
  source 1..327: mol_type = other RNA
atgaccaacctgtccgacatcatcgagaaggagaccggcaagcagctggtgatccaggagtccatcctgatgctgcccgaggaggtggaggaggtgatcggcaacaagcccgagtccgacatcctggtgcacaccgcctacgacgagtccaccgacgagaacgtgatgctgctgacctccgacgcccccgagtacaagccctgggccctggtgatccaggactccaacggcgagaacaagatcaagatgctgtccggcggctccaagcggaccgccgacggctccgagttcgagtcccccaagaagaagcggaaggtggagtgatag

SEQ ID NO: 310 - RNA, 4005 nt, synthetic construct
  source 1..4005: mol_type = other RNA
atggacggctccggcggcggctcccccaagaagaagcggaaggtggaggacaagcggcccgccgccaccaagaaggccggccaggccaagaagaagaagggcggctccggcggcggcgaggcctcccccgcctccggcccccggcacctgatggacccccacatcttcacctccaacttcaacaacggcatcggccggcacaagacctacctgtgctacgaggtggagcggctggacaacggcacctccgtgaagatggaccagcaccggggcttcctgcacaaccaggccaagaacctgctgtgcggcttctacggccggcacgccgagctgcggttcctggacctggtgccctccctgcagctggaccccgcccagatctaccgggtgacctggttcatctcctggtccccctgcttctcctggggctgcgccggcgaggtgcgggccttcctgcaggagaacacccacgtgcggctgcggatcttcgccgcccggatctacgactacgaccccctgtacaaggaggccctgcagatgctgcgggacgccggcgcccaggtgtccatcatgacctacgacgagttcaagcactgctgggacaccttcgtggaccaccagggctgccccttccagccctgggacggcctggacgagcactcccaggccctgtccggccggctgcgggccatcctgcagaaccagggcaacggcaccaaggactccaccaaggacatccccgagaccccctccaaggacgcagcgttcaaaccaaatcccatcaactacatcctgggcctggccatcggcatcgcctccgtgggctgggccatggtggagatcgacgaggaggagaaccccatccggctgatcgacctgggcgtgcgggtgttcgagcgggccgaggtgcccaagaccggcgactccctggccatggcccggcggctggcccggtccgtgcggcggctgacccggcggcgggcccaccggctgctgcgggcccggcggctgctgaagcgggagggcgtgctgcaggccgccgacttcgacgagaacggcctgatcaagtccctgcccaacaccccctggcagctgcgggccgccgccctggaccggaagctgacccccctggagtggtccgccgtgctgctgcacctgatcaagcaccggggctacctgtcccagcggaagaacgagggcgagaccgccgacaaggagctgggcgccctgctgaagggcgtggccaacaacgcccacgccctgcagaccggcgacttccggacccccgccgagctggccctgaacaagttcgagaaggagtccggccacatccggaaccagcggggcgactactcccacaccttctcccggaaggacctgcaggccgagctgatcctgctgttcgagaagcagaaggagttcggcaacccccacgtgtccggcggcctgaaggagggcatcgagaccctgctgatgacccagcggcccgccctgtccggcgacgccgtgcagaagatgctgggccactgcaccttcgagcccgccgagcccaaggccgccaagaacacctacaccgccgagcggttcatctggctgaccaagctgaacaacctgcggatcctggagcagggctccgagcggcccctgaccgacaccgagcgggccaccctgatggacgagccctaccggaagtccaagctgacctacgcccaggcccggaagctgctgggcctggaggacaccgccttcttcaagggcctgcggtacggcaaggacaacgccgaggcctccaccctgatggagatgaaggcctaccacgccatctcccgggccctggagaaggagggcctgaaggacaagaagtcccccctgaacctgtcctccgagctgcaggacgagatcggcaccgccttctccctgttcaagaccgacgaggacatcaccggccggctgaaggaccgggtgcagcccgagatcctggaggccctgctgaagcacatctccttcgacaagttcgtgcagatctccctgaaggccctgcggcggatcgtgcccctgatggagcagggcaagcggtacgacgaggcctgcgccgagatctacggcgaccactacggcaagaagaacaccgaggagaagatctacctgccccccatccccgccgacgagatccggaaccccgtggtgctgcgggccctgtcccaggcccggaaggtgatcaacggcgtggtgcggcggtacggctcccccgcccggatccacatcgagaccgcccgggaggtgggcaagtccttcaaggaccggaaggagatcgagaagcggcaggaggagaaccggaaggaccgggagaaggccgccgccaagttccgggagtacttccccaacttcgtgggcgagcccaagtccaaggacatcctgaagctgcggctgtacgagcagcagcacggcaagtgcctgtactccggcaaggagatcaacctggtgcggctgaacgagaagggctacgtggagatcgaccacgccctgcccttctcccggacctgggacgactccttcaacaacaaggtgctggtgctgggctccgagaaccagaacaagggcaaccagaccccctacgagtacttcaacggcaaggacaactcccgggagtggcaggagttcaaggcccgggtggagacctcccggttcccccggtccaagaagcagcggatcctgctgcagaagttcgacgaggacggcttcaaggagtgcaacctgaacgacacccggtacgtgaaccgcttcctgtgccagttcgtggccgaccacatcctgctgaccggcaagggcaagcggcgggtgttcgcctccaacggccagatcaccaacctgctgcggggcttctggggcctgcggaaggtgcgggccgagaacgaccggcaccacgccctggacgccgtggtggtggcctgctccaccgtggccatgcagcagaagatcacccggttcgtgcggtacaaggagatgaacgccttcgacggcaagaccatcgacaaggagaccggcaaggtgctgcaccagaagacccacttcccccagccctgggagttcttcgcccaggaggtgatgatccgggtgttcggcaagcccgacggcaagcccgagttcgaggaggccgacacccccgagaagctgcggaccctgctggccgagaagctgtcctcccggcccgaggccgtgcacgagtacgtgacccccctgttcgtgtcccgggcccccaaccggaagatgtccggcgcccacaaggacaccctgcggtccgccaagcggttcgtgaagcacaacgagaagatctccgtgaagcgggtgtggctgaccgagatcaagctggccgacctggagaacatggtgaactacaagaacggccgggagatcgagctgtacgaggccctgaaggcccggctggaggcctacggcggcaacgccaagcaggccttcgaccccaaggacaaccccttctacaagaagggcggccagctggtgaaggccgtgcgggtggagaagacccaggagtccggcgtgctgctgaacaagaagaacgcctacaccatcgccgacaacggcgacatggtgcgggtggacgtgttctgcaaggtggacaagaagggcaagaaccagtacttcatcgtgcccatctacgcctggcaggtggccgagaacatcctgcccgacatcgactgcaagggctaccggatcgacgactcctacaccttctgcttctccctgcacaagtacgacctgatcgccttccagaaggacgagaagtccaaggtggagttcgcctactacatcaactgcgactcctccaacggccggttctacctggcctggcacgacaagggctccaaggagcagcagttccggatctccacccagaacctggtgctgatccagaagtaccaggtgaacgagctgggcaaggagatccggccctgccggctgaagaagcggccccccgtgcggtag

SEQ ID NO: 311 - protein, 1334 aa, synthetic construct; identical to SEQ ID NO: 146

SEQ ID NO: 312 - RNA, 101 nt, synthetic construct; identical to SEQ ID NO: 248
  source 1..101: mol_type = other RNA
  misc_difference 1: note = 2'-O-methyl modified adenosine, cytidine, uridine, guanosine, unknown or other nucleotide with phosphorothioate linkage
  misc_difference 2: note = 2'-O-methyl modified adenosine, cytidine, uridine, guanosine, unknown or other nucleotide with phosphorothioate linkage
  misc_difference 3: note = 2'-O-methyl modified adenosine, cytidine, uridine, guanosine, unknown or other nucleotide with phosphorothioate linkage
  misc_difference 4: note = 2'-O-methyl modified adenosine, cytidine, uridine, guanosine, unknown or other nucleotide
  misc_difference 5: note = 2'-O-methyl modified adenosine, cytidine, uridine, guanosine, unknown or other nucleotide
  misc_difference 6: note = a, c, u, g, unknown or other
  misc_difference 7: note = a, c, u, g, unknown or other
  misc_difference 8: note = 2'-O-methyl modified adenosine, cytidine, uridine, guanosine, unknown or other nucleotide
  misc_difference 9: note = 2'-O-methyl modified adenosine, cytidine, uridine, guanosine, unknown or other nucleotide
  misc_difference 10: note = a, c, u, g, unknown or other
  misc_difference 11: note = 2'-O-methyl modified adenosine, cytidine, uridine, guanosine, unknown or other nucleotide
  misc_difference 12: note = a, c, u, g, unknown or other
  misc_difference 13: note = 2'-O-methyl modified adenosine, cytidine, uridine, guanosine, unknown or other nucleotide
  misc_difference 14: note = a, c, u, g, unknown or other
  misc_difference 15: note = a, c, u, g, unknown or other
  misc_difference 16: note = a, c, u, g, unknown or other
  misc_difference 17: note = a, c, u, g, unknown or other
  misc_difference 18: note = 2'-O-methyl modified adenosine, cytidine, uridine, guanosine, unknown or other nucleotide
  misc_difference 19: note = a, c, u, g, unknown or other
  misc_difference 20: note = a, c, u, g, unknown or other
  misc_difference 21: note = a, c, u, g, unknown or other
  misc_difference 22: note = 2'-O-methyl modified adenosine, cytidine, uridine, guanosine, unknown or other nucleotide
  misc_difference 23: note = a, c, u, g, unknown or other
  misc_difference 24: note = a, c, u, g, unknown or other
  modified_base 25: mod_base = OTHER; note = 2'-O-methyl modified nucleotide
  modified_base 29: mod_base = OTHER; note = 2'-O-methyl modified nucleotide
  modified_base 30: mod_base = OTHER; note = 2'-O-methyl modified nucleotide
  modified_base 31: mod_base = OTHER; note = 2'-O-methyl modified nucleotide
  modified_base 32: mod_base = OTHER; note = 2'-O-methyl modified nucleotide
  modified_base 37: mod_base = OTHER; note = 2'-O-methyl modified nucleotide
  modified_base 38: mod_base = OTHER; note = 2'-O-methyl modified nucleotide
  modified_base 39: mod_base = OTHER; note = 2'-O-methyl modified nucleotide
  modified_base 40: mod_base = OTHER; note = 2'-O-methyl modified nucleotide
  modified_base 41: mod_base = OTHER; note = 2'-O-methyl modified nucleotide
  modified_base 42: mod_base = OTHER; note = 2'-O-methyl modified nucleotide
  modified_base 43: mod_base = OTHER; note = 2'-O-methyl modified nucleotide
  modified_base 47: mod_base = OTHER; note = 2'-O-methyl modified nucleotide
  modified_base 48: mod_base = OTHER; note = 2'-O-methyl modified nucleotide
  modified_base 51: mod_base = OTHER; note = 2'-O-methyl modified nucleotide
  modified_base 58: mod_base = OTHER; note = 2'-O-methyl modified nucleotide
  modified_base 59: mod_base = OTHER; note = 2'-O-methyl modified nucleotide
  modified_base 61: mod_base = OTHER; note = 2'-O-methyl modified nucleotide
  modified_base 62: mod_base = OTHER; note = 2'-O-methyl modified nucleotide
  modified_base 63: mod_base = OTHER; note = 2'-O-methyl modified nucleotide
  modified_base 64: mod_base = OTHER; note = 2'-O-methyl modified nucleotide
  modified_base 65: mod_base = OTHER; note = 2'-O-methyl modified nucleotide
  modified_base 66: mod_base = OTHER; note = 2'-O-methyl modified nucleotide
  modified_base 67: mod_base = OTHER; note = 2'-O-methyl modified nucleotide
  modified_base 68: mod_base = OTHER; note = 2'-O-methyl modified nucleotide
  modified_base 69: mod_base = OTHER; note = 2'-O-methyl modified nucleotide
  modified_base 70: mod_base = OTHER; note = 2'-O-methyl modified nucleotide
  modified_base 75: mod_base = OTHER; note = 2'-O-methyl modified nucleotide
  modified_base 77: mod_base = OTHER; note = 2'-O-methyl modified nucleotide
  modified_base 80: mod_base = OTHER; note = 2'-O-methyl modified nucleotide
  modified_base 86: mod_base = OTHER; note = 2'-O-methyl modified nucleotide
  modified_base 87: mod_base = OTHER; note = 2'-O-methyl modified nucleotide
  modified_base 89: mod_base = OTHER; note = 2'-O-methyl modified nucleotide
  modified_base 90: mod_base = OTHER; note = 2'-O-methyl modified nucleotide
  modified_base 91: mod_base = OTHER; note = 2'-O-methyl modified nucleotide
  modified_base 92: mod_base = OTHER; note = 2'-O-methyl modified nucleotide
  modified_base 99: mod_base = OTHER; note = Nucleotide with phosphorothioate linkage
  modified_base 100: mod_base = OTHER; note = 2'-O-methyl modified nucleotide with phosphorothioate linkage
  modified_base 101: mod_base = OTHER; note = 2'-O-methyl modified nucleotide

SEQ ID NO: 313 - RNA, 101 nt, synthetic construct; identical to SEQ ID NO: 248
  source 1..101: mol_type = other RNA
  misc_difference 1: note = 2'-O-methyl modified adenosine, cytidine, uridine, guanosine, unknown or other nucleotide with phosphorothioate linkage
  misc_difference 2: note = 2'-O-methyl modified adenosine, cytidine, uridine, guanosine, unknown or other nucleotide with phosphorothioate linkage
  misc_difference 3: note = 2'-O-methyl modified adenosine, cytidine, uridine, guanosine, unknown or other nucleotide with phosphorothioate linkage
  misc_difference 4: note = 2'-O-methyl modified adenosine, cytidine, uridine, guanosine, unknown or other nucleotide
  misc_difference 5: note = 2'-O-methyl modified adenosine, cytidine, uridine, guanosine, unknown or other nucleotide
  misc_difference 6: note = a, c, u, g, unknown or other
  misc_difference 7: note = a, c, u, g, unknown or other
  misc_difference 8: note = 2'-O-methyl modified adenosine, cytidine, uridine, guanosine, unknown or other nucleotide
  misc_difference 9: note = 2'-O-methyl modified adenosine, cytidine, uridine, guanosine, unknown or other nucleotide
  misc_difference 10: note = a, c, u, g, unknown or other
  misc_difference 11: note = 2'-O-methyl modified adenosine, cytidine, uridine, guanosine, unknown or other nucleotide
  misc_difference 12: note = a, c, u, g, unknown or other
  misc_difference 13: note = 2'-O-methyl modified adenosine, cytidine, uridine, guanosine, unknown or other nucleotide
  misc_difference 14: note = a, c, u, g, unknown or other
  misc_difference 15: note = a, c, u, g, unknown or other
  misc_difference 16: note = a, c, u, g, unknown or other
  misc_difference 17: note = a, c, u, g, unknown or other
  misc_difference 18: note = 2'-O-methyl modified adenosine, cytidine, uridine, guanosine, unknown or other nucleotide
  misc_difference 19: note = a, c, u, g, unknown or other
  misc_difference 20: note = a, c, u, g, unknown or other
  misc_difference 21: note = a, c, u, g, unknown or other
  misc_difference 22: note = 2'-O-methyl modified adenosine, cytidine, uridine, guanosine, unknown or other nucleotide
  misc_difference 23: note = a, c, u, g, unknown or other
  misc_difference 24: note = a, c, u, g, unknown or other
  modified_base 25: mod_base = OTHER; note = 2'-O-methyl modified nucleotide
  modified_base 29: mod_base = OTHER; note = 2'-O-methyl modified nucleotide
  modified_base 30: mod_base = OTHER; note = 2'-O-methyl modified nucleotide
  modified_base 31: mod_base = OTHER; note = 2'-O-methyl modified nucleotide
  modified_base 32: mod_base = OTHER; note = 2'-O-methyl modified nucleotide
  modified_base 37: mod_base = OTHER; note = 2'-O-methyl modified nucleotide
  modified_base 38: mod_base = OTHER; note = 2'-O-methyl modified nucleotide
  modified_base 39: mod_base = OTHER; note = 2'-O-methyl modified nucleotide
  modified_base 40: mod_base = OTHER; note = 2'-O-methyl modified nucleotide
  modified_base 41: mod_base = OTHER; note = 2'-O-methyl modified nucleotide
  modified_base 42: mod_base = OTHER; note = 2'-O-methyl modified nucleotide
  modified_base 43: mod_base = OTHER; note = 2'-O-methyl modified nucleotide
  modified_base 47: mod_base = OTHER; note = 2'-O-methyl modified nucleotide
  modified_base 48: mod_base = OTHER; note = 2'-O-methyl modified nucleotide
  modified_base 51: mod_base = OTHER; note = 2'-O-methyl modified nucleotide
  modified_base 54: mod_base = OTHER; note = Nucleotide with phosphorothioate linkage
  modified_base 58: mod_base = OTHER; note = 2'-O-methyl modified nucleotide
  modified_base 59: mod_base = OTHER; note = 2'-O-methyl modified nucleotide
  modified_base 61: mod_base = OTHER; note = 2'-O-methyl modified nucleotide
  modified_base 62: mod_base = OTHER; note = 2'-O-methyl modified nucleotide
  modified_base 63: mod_base = OTHER; note = 2'-O-methyl modified nucleotide
  modified_base 64: mod_base = OTHER; note = 2'-O-methyl modified nucleotide
  modified_base 65: mod_base = OTHER; note = 2'-O-methyl modified nucleotide
  modified_base 66: mod_base = OTHER; note = 2'-O-methyl modified nucleotide
  modified_base 67: mod_base = OTHER; note = 2'-O-methyl modified nucleotide
  modified_base 68: mod_base = OTHER; note = 2'-O-methyl modified nucleotide
  modified_base 69: mod_base = OTHER; note = 2'-O-methyl modified nucleotide
  modified_base 70: mod_base = OTHER; note = 2'-O-methyl modified nucleotide
  modified_base 75: mod_base = OTHER; note = 2'-O-methyl modified nucleotide
  modified_base 77: mod_base = OTHER; note = 2'-O-methyl modified nucleotide
  modified_base 80: mod_base = OTHER; note = 2'-O-methyl modified nucleotide
  modified_base 82: mod_base = OTHER; note = 2'-O-methyl modified nucleotide
  modified_base 83: mod_base = OTHER; note = 2'-O-methyl modified nucleotide
  modified_base 84: mod_base = OTHER; note = 2'-O-methyl modified nucleotide
  modified_base 85: mod_base = OTHER; note = 2'-O-methyl modified nucleotide
  modified_base 86: mod_base = OTHER; note = 2'-O-methyl modified nucleotide
  modified_base 87: mod_base = OTHER; note = 2'-O-methyl modified nucleotide
  modified_base 89: mod_base = OTHER; note = 2'-O-methyl modified nucleotide
  modified_base 90: mod_base = OTHER; note = 2'-O-methyl modified nucleotide
  modified_base 91: mod_base = OTHER; note = 2'-O-methyl modified nucleotide
  modified_base 92: mod_base = OTHER; note = 2'-O-methyl modified nucleotide
  modified_base 99: mod_base = OTHER; note = Nucleotide with phosphorothioate linkage
  modified_base 100: mod_base = OTHER; note = 2'-O-methyl modified nucleotide with phosphorothioate linkage
  modified_base 101: mod_base = OTHER; note = 2'-O-methyl modified nucleotide

SEQ ID NO: 314 - RNA, 101 nt, synthetic construct; identical to SEQ ID NO: 248
  source 1..101: mol_type = other RNA
  misc_difference 1: note = 2'-O-methyl modified adenosine, cytidine, uridine, guanosine, unknown or other nucleotide with phosphorothioate linkage
  misc_difference 2: note = 2'-O-methyl modified adenosine, cytidine, uridine, guanosine, unknown or other nucleotide with phosphorothioate linkage
  misc_difference 3: note = 2'-O-methyl modified adenosine, cytidine, uridine, guanosine, unknown or other nucleotide with phosphorothioate linkage
  misc_difference 4: note = 2'-O-methyl modified adenosine, cytidine, uridine, guanosine, unknown or other nucleotide
  misc_difference 5: note = 2'-O-methyl modified adenosine, cytidine, uridine, guanosine, unknown or other nucleotide
  misc_difference 6: note = a, c, u, g, unknown or other
  misc_difference 7: note = a, c, u, g, unknown or other
  misc_difference 8: note = 2'-O-methyl modified adenosine, cytidine, uridine, guanosine, unknown or other nucleotide
  misc_difference 9: note = 2'-O-methyl modified adenosine, cytidine, uridine, guanosine, unknown or other nucleotide
  misc_difference 10: note = a, c, u, g, unknown or other
  misc_difference 11: note = 2'-O-methyl modified adenosine, cytidine, uridine, guanosine, unknown or other nucleotide
  misc_difference 12: note = a, c, u, g, unknown or other
  misc_difference 13: note = 2'-O-methyl modified adenosine, cytidine, uridine, guanosine, unknown or other nucleotide
  misc_difference 14: note = a, c, u, g, unknown or other
  misc_difference 15: note = a, c, u, g, unknown or other
  misc_difference 16: note = a, c, u, g, unknown or other
  misc_difference 17: note = a, c, u, g, unknown or other
  misc_difference 18: note = 2'-O-methyl modified adenosine, cytidine, uridine, guanosine, unknown or other nucleotide
  misc_difference 19: note = a, c, u, g, unknown or other
  misc_difference 20: note = a, c, u, g, unknown or other
  misc_difference 21: note = a, c, u, g, unknown or other
  misc_difference 22: note = 2'-O-methyl modified adenosine, cytidine, uridine, guanosine, unknown or other nucleotide
  misc_difference 23: note = a, c, u, g, unknown or other
  misc_difference 24: note = a, c, u, g, unknown or other
  modified_base 25: mod_base = OTHER; note = 2'-O-methyl modified nucleotide
  modified_base 29: mod_base = OTHER; note = 2'-O-methyl modified nucleotide
  modified_base 30: mod_base = OTHER; note = 2'-O-methyl modified nucleotide
  modified_base 31: mod_base = OTHER; note = 2'-O-methyl modified nucleotide
  modified_base 32: mod_base = OTHER; note = 2'-O-methyl modified nucleotide
  modified_base 37: mod_base = OTHER; note = 2'-O-methyl modified nucleotide
  modified_base 38: mod_base = OTHER; note = 2'-O-methyl modified nucleotide
  modified_base 39: mod_base = OTHER; note = 2'-O-methyl modified nucleotide
  modified_base 40: mod_base = OTHER; note = 2'-O-methyl modified nucleotide
  modified_base 41: mod_base = OTHER; note = 2'-O-methyl modified nucleotide
  modified_base 42: mod_base = OTHER; note = 2'-O-methyl modified nucleotide
  modified_base 43: mod_base = OTHER; note = 2'-O-methyl modified nucleotide
  modified_base 47: mod_base = OTHER; note = 2'-O-methyl modified nucleotide
  modified_base 48: mod_base = OTHER; note = 2'-O-methyl modified nucleotide
  modified_base 51: mod_base = OTHER; note = 2'-O-methyl modified nucleotide
  modified_base 58: mod_base = OTHER; note = 2'-O-methyl modified nucleotide
  modified_base 59: mod_base = OTHER; note = 2'-O-methyl modified nucleotide
  modified_base 61: mod_base = OTHER; note = 2'-O-methyl modified nucleotide
  modified_base 62: mod_base = OTHER; note = 2'-O-methyl modified nucleotide
  modified_base 63: mod_base = OTHER; note = 2'-O-methyl modified nucleotide
  modified_base 64: mod_base = OTHER; note = 2'-O-methyl modified nucleotide
  modified_base 65: mod_base = OTHER; note = 2'-O-methyl modified nucleotide
  modified_base 66: mod_base = OTHER; note = 2'-O-methyl modified nucleotide
  modified_base 67: mod_base = OTHER; note = 2'-O-methyl modified nucleotide
  modified_base 68: mod_base = OTHER; note = 2'-O-methyl modified nucleotide
  modified_base 69: mod_base = OTHER; note = 2'-O-methyl modified nucleotide
  modified_base 70: mod_base = OTHER; note = 2'-O-methyl modified nucleotide
  modified_base 75: mod_base = OTHER; note = 2'-O-methyl modified nucleotide
  modified_base 77: mod_base = OTHER; note = 2'-O-methyl modified nucleotide
  modified_base 80: mod_base = OTHER; note = 2'-O-methyl modified nucleotide
  modified_base 82: mod_base = OTHER; note = 2'-O-methyl modified nucleotide
  modified_base 83: mod_base = OTHER; note = 2'-O-methyl modified nucleotide
  modified_base 84: mod_base = OTHER; note = 2'-O-methyl modified nucleotide
  modified_base 85: mod_base = OTHER; note = 2'-O-methyl modified nucleotide
  modified_base 86: mod_base = OTHER; note = 2'-O-methyl modified nucleotide
  modified_base 87: mod_base = OTHER; note = 2'-O-methyl modified nucleotide
  modified_base 89: mod_base = OTHER; note = 2'-O-methyl modified nucleotide
  modified_base 90: mod_base = OTHER; note = 2'-O-methyl modified nucleotide
  modified_base 91: mod_base = OTHER; note = 2'-O-methyl modified nucleotide
  modified_base 92: mod_base = OTHER; note = 2'-O-methyl modified nucleotide
  modified_base 99: mod_base = OTHER; note = Nucleotide with phosphorothioate linkage
  modified_base 100: mod_base = OTHER; note = 2'-O-methyl modified nucleotide with phosphorothioate linkage
  modified_base 101: mod_base = OTHER; note = 2'-O-methyl modified nucleotide

SEQ ID NO: 315 - RNA, 20 nt, synthetic construct
  source 1..20: mol_type = other RNA
ctctcagctggtacacggca

SEQ ID NO: 316 - RNA, 100 nt, synthetic construct
  source 1..100: mol_type = other RNA
ctctcagctggtacacggcagttttagagctagaaatagcaagttaaaataaggctagtccgttatcaacttgaaaaagtggcaccgagtcggtgctttt

SEQ ID NO: 317 - RNA, 100 nt, synthetic construct; identical to SEQ ID NO: 316
  source 1..100: mol_type = other RNA
  modified_base 1: mod_base = OTHER; note = 2'-O-methyl modified nucleotide with phosphorothioate linkage
  modified_base 2: mod_base = OTHER; note = 2'-O-methyl modified nucleotide with phosphorothioate linkage
  modified_base 3: mod_base = OTHER; note = 2'-O-methyl modified nucleotide with phosphorothioate linkage
  modified_base 29: mod_base = OTHER; note = 2'-O-methyl modified nucleotide
  modified_base 30: mod_base = OTHER; note = 2'-O-methyl modified nucleotide
  modified_base 31: mod_base = OTHER; note = 2'-O-methyl modified nucleotide
  modified_base 32: mod_base = OTHER; note = 2'-O-methyl modified nucleotide
  modified_base 33: mod_base = OTHER; note = 2'-O-methyl modified nucleotide
  modified_base 34: mod_base = OTHER; note = 2'-O-methyl modified nucleotide
  modified_base 35: mod_base = OTHER; note = 2'-O-methyl modified nucleotide
  modified_base 36: mod_base = OTHER; note = 2'-O-methyl modified nucleotide
  modified_base 37: mod_base = OTHER; note = 2'-O-methyl modified nucleotide
  modified_base 38: mod_base = OTHER; note = 2'-O-methyl modified nucleotide
  modified_base 39: mod_base = OTHER; note = 2'-O-methyl modified nucleotide
  modified_base 40: mod_base = OTHER; note = 2'-O-methyl modified nucleotide
  modified_base 69: mod_base = OTHER; note = 2'-O-methyl modified nucleotide
  modified_base 70: mod_base = OTHER; note = 2'-O-methyl modified nucleotide
  modified_base 71: mod_base = OTHER; note = 2'-O-methyl modified nucleotide
  modified_base 72: mod_base = OTHER; note = 2'-O-methyl modified nucleotide
  modified_base 73: mod_base = OTHER; note = 2'-O-methyl modified nucleotide
  modified_base 74: mod_base = OTHER; note = 2'-O-methyl modified nucleotide
  modified_base 75: mod_base = OTHER; note = 2'-O-methyl modified nucleotide
  modified_base 76: mod_base = OTHER; note = 2'-O-methyl modified nucleotide
  modified_base 77: mod_base = OTHER; note = 2'-O-methyl modified nucleotide
  modified_base 78: mod_base = OTHER; note = 2'-O-methyl modified nucleotide
  modified_base 79: mod_base = OTHER; note = 2'-O-methyl modified nucleotide
  modified_base 80: mod_base = OTHER; note = 2'-O-methyl modified nucleotide
  modified_base 81: mod_base = OTHER; note = 2'-O-methyl modified nucleotide
  modified_base 82: mod_base = OTHER; note = 2'-O-methyl modified nucleotide
  modified_base 83: mod_base = OTHER; note = 2'-O-methyl modified nucleotide
  modified_base 84: mod_base = OTHER; note = 2'-O-methyl modified nucleotide
  modified_base 85: mod_base = OTHER; note = 2'-O-methyl modified nucleotide
  modified_base 86: mod_base = OTHER; note = 2'-O-methyl modified nucleotide
  modified_base 87: mod_base = OTHER; note = 2'-O-methyl modified nucleotide
  modified_base 88: mod_base = OTHER; note = 2'-O-methyl modified nucleotide
  modified_base 89: mod_base = OTHER; note = 2'-O-methyl modified nucleotide
  modified_base 90: mod_base = OTHER; note = 2'-O-methyl modified nucleotide
  modified_base 91: mod_base = OTHER; note = 2'-O-methyl modified nucleotide
  modified_base 92: mod_base = OTHER; note = 2'-O-methyl modified nucleotide
  modified_base 93: mod_base = OTHER; note = 2'-O-methyl modified nucleotide
  modified_base 94: mod_base = OTHER; note = 2'-O-methyl modified nucleotide
  modified_base 95: mod_base = OTHER; note = 2'-O-methyl modified nucleotide
  modified_base 96: mod_base = OTHER; note = 2'-O-methyl modified nucleotide
  modified_base 97: mod_base = OTHER; note = 2'-O-methyl modified nucleotide with phosphorothioate linkage
  modified_base 98: mod_base = OTHER; note = 2'-O-methyl modified nucleotide with phosphorothioate linkage
  modified_base 99: mod_base = OTHER; note = 2'-O-methyl modified nucleotide with phosphorothioate linkage
  modified_base 100: mod_base = OTHER; note = 2'-O-methyl modified nucleotide

SEQ ID NO: 318 - RNA, 20 nt, synthetic construct
  source 1..20: mol_type = other RNA
cccccggacggttcaagcaa

SEQ ID NO: 319 - RNA, 100 nt, synthetic construct
  source 1..100: mol_type = other RNA
cccccggacggttcaagcaagttttagagctagaaatagcaagttaaaataaggctagtccgttatcaacttgaaaaagtggcaccgagtcggtgctttt

SEQ ID NO: 320 - RNA, 100 nt, synthetic construct; identical to SEQ ID NO: 319
  source 1..100: mol_type = other RNA
  modified_base 1: mod_base = OTHER; note = 2'-O-methyl modified nucleotide with phosphorothioate linkage
  modified_base 2: mod_base = OTHER; note = 2'-O-methyl modified nucleotide with phosphorothioate linkage
  modified_base 3: mod_base = OTHER; note = 2'-O-methyl modified nucleotide with phosphorothioate linkage
  modified_base 29: mod_base = OTHER; note = 2'-O-methyl modified nucleotide
  modified_base 30: mod_base = OTHER; note = 2'-O-methyl modified nucleotide
  modified_base 31: mod_base = OTHER; note = 2'-O-methyl modified nucleotide
  modified_base 32: mod_base = OTHER; note = 2'-O-methyl modified nucleotide
  modified_base 33: mod_base = OTHER; note = 2'-O-methyl modified nucleotide
  modified_base 34: mod_base = OTHER; note = 2'-O-methyl modified nucleotide
  modified_base 35: mod_base = OTHER; note = 2'-O-methyl modified nucleotide
  modified_base 36: mod_base = OTHER; note = 2'-O-methyl modified nucleotide
  modified_base 37: mod_base = OTHER; note = 2'-O-methyl modified nucleotide
  modified_base 38: mod_base = OTHER; note = 2'-O-methyl modified nucleotide
  modified_base 39: mod_base = OTHER; note = 2'-O-methyl modified nucleotide
  modified_base 40: mod_base = OTHER; note = 2'-O-methyl modified nucleotide
  modified_base 69: mod_base = OTHER; note = 2'-O-methyl modified nucleotide
  modified_base 70: mod_base = OTHER; note = 2'-O-methyl modified nucleotide
  modified_base 71: mod_base = OTHER; note = 2'-O-methyl modified nucleotide
  modified_base 72: mod_base = OTHER; note = 2'-O-methyl modified nucleotide
  modified_base 73: mod_base = OTHER; note = 2'-O-methyl modified nucleotide
  modified_base 74: mod_base = OTHER; note = 2'-O-methyl modified nucleotide
  modified_base 75: mod_base = OTHER; note = 2'-O-methyl modified nucleotide
  modified_base 76: mod_base = OTHER; note = 2'-O-methyl modified nucleotide
  modified_base 77: mod_base = OTHER; note = 2'-O-methyl modified nucleotide
  modified_base 78: mod_base = OTHER; note = 2'-O-methyl modified nucleotide
  modified_base 79: mod_base = OTHER; note = 2'-O-methyl modified nucleotide
  modified_base 80: mod_base = OTHER; note = 2'-O-methyl modified nucleotide
  modified_base 81: mod_base = OTHER; note = 2'-O-methyl modified nucleotide
  modified_base 82: mod_base = OTHER; note = 2'-O-methyl modified nucleotide
  modified_base 83: mod_base = OTHER; note = 2'-O-methyl modified nucleotide
  modified_base 84: mod_base = OTHER; note = 2'-O-methyl modified nucleotide
  modified_base 85: mod_base = OTHER; note = 2'-O-methyl modified nucleotide
  modified_base 86: mod_base = OTHER; note = 2'-O-methyl modified nucleotide
  modified_base 87: mod_base = OTHER; note = 2'-O-methyl modified nucleotide
  modified_base 88: mod_base = OTHER; note = 2'-O-methyl modified nucleotide
  modified_base 89: mod_base = OTHER; note = 2'-O-methyl modified nucleotide
  modified_base 90: mod_base = OTHER; note = 2'-O-methyl modified nucleotide
  modified_base 91: mod_base = OTHER; note = 2'-O-methyl modified nucleotide
  modified_base 92: mod_base = OTHER; note = 2'-O-methyl modified nucleotide
  modified_base 93: mod_base = OTHER; note = 2'-O-methyl modified nucleotide
  modified_base 94: mod_base = OTHER; note = 2'-O-methyl modified nucleotide
  modified_base 95: mod_base = OTHER; note = 2'-O-methyl modified nucleotide
  modified_base 96: mod_base = OTHER; note = 2'-O-methyl modified nucleotide
  modified_base 97: mod_base = OTHER; note = 2'-O-methyl modified nucleotide with phosphorothioate linkage
  modified_base 98: mod_base = OTHER; note = 2'-O-methyl modified nucleotide with phosphorothioate linkage
  modified_base 99: mod_base = OTHER; note = 2'-O-methyl modified nucleotide with phosphorothioate linkage
  modified_base 100: mod_base = OTHER; note = 2'-O-methyl modified nucleotide

SEQ ID NO: 321 - RNA, 20 nt, synthetic construct
  source 1..20: mol_type = other RNA
ggctctcggagaatgacgag

SEQ ID NO: 322 - RNA, 100 nt, synthetic construct
  source 1..100: mol_type = other RNA
ggctctcggagaatgacgaggttttagagctagaaatagcaagttaaaataaggctagtccgttatcaacttgaaaaagtggcaccgagtcggtgctttt

SEQ ID NO: 323 - RNA, 100 nt, synthetic construct; identical to SEQ ID NO: 322
  source 1..100: mol_type = other RNA
  modified_base 1: mod_base = OTHER; note = 2'-O-methyl modified nucleotide with phosphorothioate linkage
  modified_base 2: mod_base = OTHER; note = 2'-O-methyl modified nucleotide with phosphorothioate linkage
  modified_base 3: mod_base = OTHER; note = 2'-O-methyl modified nucleotide with phosphorothioate linkage
  modified_base 29: mod_base = OTHER; note = 2'-O-methyl modified nucleotide
  modified_base 30: mod_base = OTHER; note = 2'-O-methyl modified nucleotide
  modified_base 31: mod_base = OTHER; note = 2'-O-methyl modified nucleotide
  modified_base 32: mod_base = OTHER; note = 2'-O-methyl modified nucleotide
  modified_base 33: mod_base = OTHER; note = 2'-O-methyl modified nucleotide
  modified_base 34: mod_base = OTHER; note = 2'-O-methyl modified nucleotide
  modified_base 35: mod_base = OTHER; note = 2'-O-methyl modified nucleotide
  modified_base 36: mod_base = OTHER; note = 2'-O-methyl modified nucleotide
  modified_base 37: mod_base = OTHER; note = 2'-O-methyl modified nucleotide
  modified_base 38: mod_base = OTHER; note = 2'-O-methyl modified nucleotide
  modified_base 39: mod_base = OTHER; note = 2'-O-methyl modified nucleotide
  modified_base 40: mod_base = OTHER; note = 2'-O-methyl modified nucleotide
  modified_base 69: mod_base = OTHER; note = 2'-O-methyl modified nucleotide
  modified_base 70: mod_base = OTHER; note = 2'-O-methyl modified nucleotide
  modified_base 71: mod_base = OTHER; note = 2'-O-methyl modified nucleotide
  modified_base 72: mod_base = OTHER; note = 2'-O-methyl modified nucleotide
  modified_base 73: mod_base = OTHER; note = 2'-O-methyl modified nucleotide
  modified_base 74: mod_base = OTHER; note = 2'-O-methyl modified nucleotide
  modified_base 75: mod_base = OTHER; note = 2'-O-methyl modified nucleotide
  modified_base 76: mod_base = OTHER; note = 2'-O-methyl modified nucleotide
  modified_base 77: mod_base = OTHER; note = 2'-O-methyl modified nucleotide
  modified_base 78: mod_base = OTHER; note = 2'-O-methyl modified nucleotide
  modified_base 79: mod_base = OTHER; note = 2'-O-methyl modified nucleotide
  modified_base 80: mod_base = OTHER; note = 2'-O-methyl modified nucleotide
  modified_base 81: mod_base = OTHER; note = 2'-O-methyl modified nucleotide
  modified_base 82: mod_base = OTHER; note = 2'-O-methyl modified nucleotide
  modified_base 83: mod_base = OTHER; note = 2'-O-methyl modified nucleotide
  modified_base 84: mod_base = OTHER; note = 2'-O-methyl modified nucleotide
  modified_base 85: mod_base = OTHER; note = 2'-O-methyl modified nucleotide
  modified_base 86: mod_base = OTHER; note = 2'-O-methyl modified nucleotide
  modified_base 87: mod_base = OTHER; note = 2'-O-methyl modified nucleotide
  modified_base 88: mod_base = OTHER; note = 2'-O-methyl modified nucleotide
  modified_base 89: mod_base = OTHER; note = 2'-O-methyl modified nucleotide
  modified_base 90: mod_base = OTHER; note = 2'-O-methyl modified nucleotide
  modified_base 91: mod_base = OTHER; note = 2'-O-methyl modified nucleotide
  modified_base 92: mod_base = OTHER; note = 2'-O-methyl modified nucleotide
  modified_base 93: mod_base = OTHER; note = 2'-O-methyl modified nucleotide
  modified_base 94: mod_base = OTHER; note = 2'-O-methyl modified nucleotide
  modified_base 95: mod_base = OTHER; note = 2'-O-methyl modified nucleotide
  modified_base 96: mod_base = OTHER; note = 2'-O-methyl modified nucleotide
  modified_base 97: mod_base = OTHER; note = 2'-O-methyl modified nucleotide with phosphorothioate linkage
  modified_base 98: mod_base = OTHER; note = 2'-O-methyl modified nucleotide with phosphorothioate linkage
  modified_base 99: mod_base = OTHER; note = 2'-O-methyl modified nucleotide with phosphorothioate linkage
  modified_base 100: mod_base = OTHER; note = 2'-O-methyl modified nucleotide

SEQ ID NO: 324 - RNA, 20 nt, synthetic construct
  source 1..20: mol_type = other RNA
ggcctcggcgctgacgatct

SEQ ID NO: 325 - RNA, 100 nt, synthetic construct
  source 1..100: mol_type = other RNA
ggcctcggcgctgacgatctgttttagagctagaaatagcaagttaaaataaggctagtccgttatcaacttgaaaaagtggcaccgagtcggtgctttt

SEQ ID NO: 326 - RNA, 100 nt, synthetic construct; identical to SEQ ID NO: 325
  source 1..100: mol_type = other RNA
  modified_base 1: mod_base = OTHER; note = 2'-O-methyl modified nucleotide with phosphorothioate linkage
  modified_base 2: mod_base = OTHER; note = 2'-O-methyl modified nucleotide with phosphorothioate linkage
  modified_base 3: mod_base = OTHER; note = 2'-O-methyl modified nucleotide with phosphorothioate linkage
  modified_base 29: mod_base = OTHER; note = 2'-O-methyl modified nucleotide
  modified_base 30: mod_base = OTHER; note = 2'-O-methyl modified nucleotide
  modified_base 31: mod_base = OTHER; note = 2'-O-methyl modified nucleotide
  modified_base 32: mod_base = OTHER; note = 2'-O-methyl modified nucleotide
  modified_base 33: mod_base = OTHER; note = 2'-O-methyl modified nucleotide
  modified_base 34: mod_base = OTHER; note = 2'-O-methyl modified nucleotide
  modified_base 35: mod_base = OTHER; note = 2'-O-methyl modified nucleotide
  modified_base 36: mod_base = OTHER; note = 2'-O-methyl modified nucleotide
  modified_base 37: mod_base = OTHER; note = 2'-O-methyl modified nucleotide
  modified_base 38: mod_base = OTHER; note = 2'-O-methyl modified nucleotide
  modified_base 39: mod_base = OTHER; note = 2'-O-methyl modified nucleotide
  modified_base 40: mod_base = OTHER; note = 2'-O-methyl modified nucleotide
  modified_base 69: mod_base = OTHER; note = 2'-O-methyl modified nucleotide
  modified_base 70: mod_base = OTHER; note = 2'-O-methyl modified nucleotide
  modified_base 71: mod_base = OTHER; note = 2'-O-methyl modified nucleotide
  modified_base 72: mod_base = OTHER; note = 2'-O-methyl modified nucleotide
  modified_base 73: mod_base = OTHER; note = 2'-O-methyl modified nucleotide
  modified_base 74: mod_base = OTHER; note = 2'-O-methyl modified nucleotide
  modified_base 75: mod_base = OTHER; note = 2'-O-methyl modified nucleotide
  modified_base 76: mod_base = OTHER; note = 2'-O-methyl modified nucleotide
  modified_base 77: mod_base = OTHER; note = 2'-O-methyl modified nucleotide
  modified_base 78: mod_base = OTHER; note = 2'-O-methyl modified nucleotide
  modified_base 79: mod_base = OTHER; note = 2'-O-methyl modified nucleotide
  modified_base 80: mod_base = OTHER; note = 2'-O-methyl modified nucleotide
  modified_base 81: mod_base = OTHER; note = 2'-O-methyl modified nucleotide
  modified_base 82: mod_base = OTHER; note = 2'-O-methyl modified nucleotide
  modified_base 83: mod_base = OTHER; note = 2'-O-methyl modified nucleotide
  modified_base 84: mod_base = OTHER; note = 2'-O-methyl modified nucleotide
  modified_base 85: mod_base = OTHER; note = 2'-O-methyl modified nucleotide
  modified_base 86: mod_base = OTHER; note = 2'-O-methyl modified nucleotide
  modified_base 87: mod_base = OTHER; note = 2'-O-methyl modified nucleotide
  modified_base 88: mod_base = OTHER; note = 2'-O-methyl modified nucleotide
  modified_base 89: mod_base = OTHER; note = 2'-O-methyl modified nucleotide
  modified_base 90: mod_base = OTHER; note = 2'-O-methyl modified nucleotide
  modified_base 91: mod_base = OTHER; note = 2'-O-methyl modified nucleotide
  modified_base 92: mod_base = OTHER; note = 2'-O-methyl modified nucleotide
  modified_base 93: mod_base = OTHER; note = 2'-O-methyl modified nucleotide
  modified_base 94: mod_base = OTHER; note = 2'-O-methyl modified nucleotide
  modified_base 95: mod_base = OTHER; note = 2'-O-methyl modified nucleotide
  modified_base 96: mod_base = OTHER; note = 2'-O-methyl modified nucleotide
  modified_base 97: mod_base = OTHER; note = 2'-O-methyl modified nucleotide with phosphorothioate linkage
  modified_base 98: mod_base = OTHER; note = 2'-O-methyl modified nucleotide with phosphorothioate linkage
  modified_base 99: mod_base = OTHER; note = 2'-O-methyl modified nucleotide with phosphorothioate linkage
  modified_base 100: mod_base = OTHER; note = 2'-O-methyl modified nucleotide

SEQ ID NO: 327 - RNA, 20 nt, synthetic construct
  source 1..20: mol_type = other RNA
acagcgacgccgcgagccag

SEQ ID NO: 328 - RNA, 100 nt, synthetic construct
  source 1..100: mol_type = other RNA
acagcgacgccgcgagccaggttttagagctagaaatagcaagttaaaataaggctagtccgttatcaacttgaaaaagtggcaccgagtcggtgctttt

SEQ ID NO: 329 - RNA, 100 nt, synthetic construct; identical to SEQ ID NO: 328
  source 1..100: mol_type = other RNA
  modified_base 1: mod_base = OTHER; note = 2'-O-methyl modified nucleotide with phosphorothioate linkage
  modified_base 2: mod_base = OTHER; note = 2'-O-methyl modified nucleotide with phosphorothioate linkage
  modified_base 3: mod_base = OTHER; note = 2'-O-methyl modified nucleotide with phosphorothioate linkage
  modified_base 29: mod_base = OTHER; note = 2'-O-methyl modified nucleotide
  modified_base 30: mod_base = OTHER; note = 2'-O-methyl modified nucleotide
  modified_base 31: mod_base = OTHER; note = 2'-O-methyl modified nucleotide
  modified_base 32: mod_base = OTHER; note = 2'-O-methyl modified nucleotide
  modified_base 33: mod_base = OTHER; note = 2'-O-methyl modified nucleotide
  modified_base 34: mod_base = OTHER; note = 2'-O-methyl modified nucleotide
  modified_base 35: mod_base = OTHER; note = 2'-O-methyl modified nucleotide
  modified_base 36: mod_base = OTHER; note = 2'-O-methyl modified nucleotide
  modified_base 37: mod_base = OTHER; note = 2'-O-methyl modified nucleotide
  modified_base 38: mod_base = OTHER; note = 2'-O-methyl modified nucleotide
  modified_base 39: mod_base = OTHER; note = 2'-O-methyl modified nucleotide
  modified_base 40: mod_base = OTHER; note = 2'-O-methyl modified nucleotide
  modified_base 69: mod_base = OTHER; note = 2'-O-methyl modified nucleotide
  modified_base 70: mod_base = OTHER; note = 2'-O-methyl modified nucleotide
  modified_base 71: mod_base = OTHER; note = 2'-O-methyl modified nucleotide
  modified_base 72: mod_base = OTHER; note = 2'-O-methyl modified nucleotide
  modified_base 73: mod_base = OTHER; note = 2'-O-methyl modified nucleotide
  modified_base 74: mod_base = OTHER; note = 2'-O-methyl modified nucleotide
  modified_base 75: mod_base = OTHER; note = 2'-O-methyl modified nucleotide
  modified_base 76: mod_base = OTHER; note = 2'-O-methyl modified nucleotide
  modified_base 77: mod_base = OTHER; note = 2'-O-methyl modified nucleotide
  modified_base 78: mod_base = OTHER; note = 2'-O-methyl modified nucleotide
  modified_base 79: mod_base = OTHER; note = 2'-O-methyl modified nucleotide
  modified_base 80: mod_base = OTHER; note = 2'-O-methyl modified nucleotide
  modified_base 81: mod_base = OTHER; note = 2'-O-methyl modified nucleotide
  modified_base 82: mod_base = OTHER; note = 2'-O-methyl modified nucleotide
  modified_base 83: mod_base = OTHER; note = 2'-O-methyl modified nucleotide
  modified_base 84: mod_base = OTHER; note = 2'-O-methyl modified nucleotide
  modified_base 85: mod_base = OTHER; note = 2'-O-methyl modified nucleotide
  modified_base 86: mod_base = OTHER; note = 2'-O-methyl modified nucleotide
  modified_base 87: mod_base = OTHER; note = 2'-O-methyl modified nucleotide
  modified_base 88: mod_base = OTHER; note = 2'-O-methyl modified nucleotide
  modified_base 89: mod_base = OTHER; note = 2'-O-methyl modified nucleotide
  modified_base 90: mod_base = OTHER; note = 2'-O-methyl modified nucleotide
  modified_base 91: mod_base = OTHER; note = 2'-O-methyl modified nucleotide
  modified_base 92: mod_base = OTHER; note = 2'-O-methyl modified nucleotide
  modified_base 93: mod_base = OTHER; note = 2'-O-methyl modified nucleotide
  modified_base 94: mod_base = OTHER; note = 2'-O-methyl modified nucleotide
  modified_base 95: mod_base = OTHER; note = 2'-O-methyl modified nucleotide
  modified_base 96: mod_base = OTHER; note = 2'-O-methyl modified nucleotide
  modified_base 97: mod_base = OTHER; note = 2'-O-methyl modified nucleotide with phosphorothioate linkage
  modified_base 98: mod_base = OTHER; note = 2'-O-methyl modified nucleotide with phosphorothioate linkage
  modified_base 99: mod_base = OTHER; note = 2'-O-methyl modified nucleotide with phosphorothioate linkage
  modified_base 100: mod_base = OTHER; note = 2'-O-methyl modified nucleotide

SEQ ID NO: 330 - RNA, 24 nt, synthetic construct
  source 1..24: mol_type = other RNA
atatccagaaccctgaccctgccg

SEQ ID NO: 331 - RNA, 101 nt, synthetic construct
  source 1..101: mol_type = other RNA
atatccagaaccctgaccctgccggttgtagctccctgaaaccgttgctacaataaggccgtcgaaagatgtgccgcaacgctctgccttctggcatcgtt

SEQ ID NO: 332 - RNA, 101 nt, synthetic construct; identical to SEQ ID NO: 331
  source 1..101: mol_type = other RNA
  modified_base 1: mod_base = OTHER; note = 2'-O-methyl modified nucleotide with phosphorothioate linkage
  modified_base 2: mod_base = OTHER; note = 2'-O-methyl modified nucleotide with phosphorothioate linkage
  modified_base 3: mod_base = OTHER; note = 2'-O-methyl modified nucleotide with phosphorothioate linkage
  modified_base 4: mod_base = OTHER; note = 2'-O-methyl modified nucleotide
  modified_base 5: mod_base = OTHER; note = 2'-O-methyl modified nucleotide
  modified_base 8: mod_base = OTHER; note = 2'-O-methyl modified nucleotide
  modified_base 9: mod_base = OTHER; note = 2'-O-methyl modified nucleotide
  modified_base 11: mod_base = OTHER; note = 2'-O-methyl modified nucleotide
  modified_base 13: mod_base = OTHER; note = 2'-O-methyl modified nucleotide
  modified_base 18: mod_base = OTHER; note = 2'-O-methyl modified nucleotide
  modified_base 22: mod_base = OTHER; note = 2'-O-methyl modified nucleotide
  modified_base 25: mod_base = OTHER; note = 2'-O-methyl modified nucleotide
  modified_base 29: mod_base = OTHER; note = 2'-O-methyl modified nucleotide
  modified_base 30: mod_base = OTHER; note = 2'-O-methyl modified nucleotide
  modified_base 31: mod_base = OTHER; note = 2'-O-methyl modified nucleotide
  modified_base 32: mod_base = OTHER; note = 2'-O-methyl modified nucleotide
  modified_base 37: mod_base = OTHER; note = 2'-O-methyl modified nucleotide
  modified_base 38: mod_base = OTHER; note = 2'-O-methyl modified nucleotide
  modified_base 39: mod_base = OTHER; note = 2'-O-methyl modified nucleotide
  modified_base 40: mod_base = OTHER; note = 2'-O-methyl modified nucleotide
  modified_base 41: mod_base = OTHER; note = 2'-O-methyl modified nucleotide
  modified_base 42: mod_base = OTHER; note = 2'-O-methyl modified nucleotide
  modified_base 43: mod_base = OTHER; note = 2'-O-methyl modified nucleotide
  modified_base 47: mod_base = OTHER; note = 2'-O-methyl modified nucleotide
  modified_base 48: mod_base = OTHER; note = 2'-O-methyl modified nucleotide
  modified_base 51: mod_base = OTHER; note = 2'-O-methyl modified nucleotide
  modified_base 54: mod_base = OTHER; note = Nucleotide with phosphorothioate linkage
  modified_base 58: mod_base = OTHER; note = 2'-O-methyl modified nucleotide
  modified_base 59: mod_base = OTHER; note = 2'-O-methyl modified nucleotide
  modified_base 61: mod_base = OTHER; note = 2'-O-methyl modified nucleotide
  modified_base 62: mod_base = OTHER; note = 2'-O-methyl modified nucleotide
  modified_base 63: mod_base = OTHER; note = 2'-O-methyl modified nucleotide
  modified_base 64: mod_base = OTHER; note = 2'-O-methyl modified nucleotide
  modified_base 65: mod_base = OTHER; note = 2'-O-methyl modified nucleotide
  modified_base 66: mod_base = OTHER; note = 2'-O-methyl modified nucleotide
  modified_base 67: mod_base = OTHER; note = 2'-O-methyl modified nucleotide
  modified_base 68: mod_base = OTHER; note = 2'-O-methyl modified nucleotide
  modified_base 69: mod_base = OTHER; note = 2'-O-methyl modified nucleotide
  modified_base 70: mod_base = OTHER; note = 2'-O-methyl modified nucleotide
  modified_base 75: mod_base = OTHER; note = 2'-O-methyl modified nucleotide
  modified_base 77: mod_base = OTHER; note = 2'-O-methyl modified nucleotide
  modified_base 80: mod_base = OTHER; note = 2'-O-methyl modified nucleotide
  modified_base 86: mod_base = OTHER; note = 2'-O-methyl modified nucleotide
  modified_base 87: mod_base = OTHER; note = 2'-O-methyl modified nucleotide
  modified_base 89: mod_base = OTHER; note = 2'-O-methyl modified nucleotide
  modified_base 90: mod_base = OTHER; note = 2'-O-methyl modified nucleotide
  modified_base 91: mod_base = OTHER; note = 2'-O-methyl modified nucleotide
  modified_base 92: mod_base = OTHER; note = 2'-O-methyl modified nucleotide
  modified_base 99: mod_base = OTHER; note = Nucleotide with phosphorothioate linkage
  modified_base 100: mod_base = OTHER; note = 2'-O-methyl modified nucleotide with phosphorothioate linkage
  modified_base 101: mod_base = OTHER; note = 2'-O-methyl modified nucleotide

SEQ ID NO: 333 - RNA, 20 nt, synthetic construct
  source 1..20: mol_type = other RNA
ttcaaaacctgtcagtgatt

SEQ ID NO: 334 - RNA, 91 nt, synthetic construct
  source 1..91: mol_type = other RNA
ttcaaaacctgtcagtgattgttttagagctagaaatagcaagttaaaataaggctagtccgttatcacgaaagggcaccgagtcggtgct

SEQ ID NO: 335 - RNA, 91 nt, synthetic construct; identical to SEQ ID NO: 334
  source 1..91: mol_type = other RNA
  modified_base 1: mod_base = OTHER; note = 2'-O-methyl modified nucleotide with phosphorothioate linkage
  modified_base 2: mod_base = OTHER; note = 2'-O-methyl modified nucleotide with phosphorothioate linkage
  modified_base 3: mod_base = OTHER; note = 2'-O-methyl modified nucleotide with phosphorothioate linkage
  modified_base 29: mod_base = OTHER; note = 2'-O-methyl modified nucleotide
  modified_base 30: mod_base = OTHER; note = 2'-O-methyl modified nucleotide
  modified_base 31: mod_base = OTHER; note = 2'-O-methyl modified nucleotide
  modified_base 32: mod_base = OTHER; note = 2'-O-methyl modified nucleotide
  modified_base 33: mod_base = OTHER; note = 2'-O-methyl modified nucleotide
  modified_base 34: mod_base = OTHER; note = 2'-O-methyl modified nucleotide
  modified_base 35: mod_base = OTHER; note = 2'-O-methyl modified nucleotide
  modified_base 36: mod_base = OTHER; note = 2'-O-methyl modified nucleotide
  modified_base 37: mod_base = OTHER; note = 2'-O-methyl modified nucleotide
  modified_base 38: mod_base = OTHER; note = 2'-O-methyl modified nucleotide
  modified_base 39: mod_base = OTHER; note = 2'-O-methyl modified nucleotide
  modified_base 40: mod_base = OTHER; note = 2'-O-methyl modified nucleotide
  modified_base 88: mod_base = OTHER; note = 2'-O-methyl modified nucleotide
  modified_base 89: mod_base = OTHER; note = 2'-O-methyl modified nucleotide
  modified_base 90: mod_base = OTHER; note = 2'-O-methyl modified nucleotide with phosphorothioate linkage
  modified_base 91: mod_base = OTHER; note = 2'-O-methyl modified nucleotide

SEQ ID NO: 336 - RNA, 20 nt, synthetic construct
  source 1..20: mol_type = other RNA
cgcccaggtcctcacgtctg

SEQ ID NO: 337 - RNA, 91 nt, synthetic construct
  source 1..91: mol_type = other RNA
cgcccaggtcctcacgtctggttttagagctagaaatagcaagttaaaataaggctagtccgttatcacgaaagggcaccgagtcggtgct

SEQ ID NO: 338 - RNA, 91 nt, synthetic construct; identical to SEQ ID NO: 337
  source 1..91: mol_type = other RNA
  modified_base 1: mod_base = OTHER; note = 2'-O-methyl modified nucleotide with phosphorothioate linkage
  modified_base 2: mod_base = OTHER; note = 2'-O-methyl modified nucleotide with phosphorothioate linkage
  modified_base 3: mod_base = OTHER; note = 2'-O-methyl modified nucleotide with phosphorothioate linkage
  modified_base 29: mod_base = OTHER; note = 2'-O-methyl modified nucleotide
  modified_base 30: mod_base = OTHER; note = 2'-O-methyl modified nucleotide
  modified_base 31: mod_base = OTHER; note = 2'-O-methyl modified nucleotide
  modified_base 32: mod_base = OTHER; note = 2'-O-methyl modified nucleotide
  modified_base 33: mod_base = OTHER; note = 2'-O-methyl modified nucleotide
  modified_base 34: mod_base = OTHER; note = 2'-O-methyl modified nucleotide
  modified_base 35: mod_base = OTHER; note = 2'-O-methyl modified nucleotide
  modified_base 36: mod_base = OTHER; note = 2'-O-methyl modified nucleotide
  modified_base 37: mod_base = OTHER; note = 2'-O-methyl modified nucleotide
  modified_base 38: mod_base = OTHER; note = 2'-O-methyl modified nucleotide
  modified_base 39: mod_base = OTHER; note = 2'-O-methyl modified nucleotide
  modified_base 40: mod_base = OTHER; note = 2'-O-methyl modified nucleotide
  modified_base 88: mod_base = OTHER; note = 2'-O-methyl modified nucleotide
  modified_base 89: mod_base = OTHER; note = 2'-O-methyl modified nucleotide
  modified_base 90: mod_base = OTHER; note = 2'-O-methyl modified nucleotide with phosphorothioate linkage
  modified_base 91: mod_base = OTHER; note = 2'-O-methyl modified nucleotide

SEQ ID NO: 339 - RNA, 20 nt, synthetic construct
  source 1..20: mol_type = other RNA
gctgcagcgcacgggtacca

SEQ ID NO: 340 - RNA, 91 nt, synthetic construct
  source 1..91: mol_type = other RNA
gctgcagcgcacgggtaccagttttagagctagaaatagcaagttaaaataaggctagtccgttatcacgaaagggcaccgagtcggtgct

SEQ ID NO: 341 - RNA, 91 nt, synthetic construct; identical to SEQ ID NO: 340
  source 1..91: mol_type = other RNA
  modified_base 1: mod_base = OTHER; note = 2'-O-methyl modified nucleotide with phosphorothioate linkage
  modified_base 2: mod_base = OTHER; note = 2'-O-methyl modified nucleotide with phosphorothioate linkage
  modified_base 3: mod_base = OTHER; note = 2'-O-methyl modified nucleotide with phosphorothioate linkage
  modified_base 29: mod_base = OTHER; note = 2'-O-methyl modified nucleotide
  modified_base 30: mod_base = OTHER; note = 2'-O-methyl modified nucleotide
  modified_base 31: mod_base = OTHER; note = 2'-O-methyl modified nucleotide
  modified_base 32: mod_base = OTHER; note = 2'-O-methyl modified nucleotide
  modified_base 33: mod_base = OTHER; note = 2'-O-methyl modified nucleotide
  modified_base 34: mod_base = OTHER; note = 2'-O-methyl modified nucleotide
  modified_base 35: mod_base = OTHER; note = 2'-O-methyl modified nucleotide
  modified_base 36: mod_base = OTHER; note = 2'-O-methyl modified nucleotide
  modified_base 37: mod_base = OTHER; note = 2'-O-methyl modified nucleotide
  modified_base 38: mod_base = OTHER; note = 2'-O-methyl modified nucleotide
  modified_base 39: mod_base = OTHER; note = 2'-O-methyl modified nucleotide
  modified_base 40: mod_base = OTHER; note = 2'-O-methyl modified nucleotide
  modified_base 88: mod_base = OTHER; note = 2'-O-methyl modified nucleotide
  modified_base 89: mod_base = OTHER; note = 2'-O-methyl modified nucleotide
  modified_base 90: mod_base = OTHER; note = 2'-O-methyl modified nucleotide with phosphorothioate linkage
  modified_base 91: mod_base = OTHER; note = 2'-O-methyl modified nucleotide

SEQ ID NO: 342 - RNA, 20 nt, synthetic construct
  source 1..20: mol_type = other RNA
ccacacccaaaaggccacac

SEQ ID NO: 343 - RNA, 91 nt, synthetic construct
  source 1..91: mol_type = other RNA
ccacacccaaaaggccacacgttttagagctagaaatagcaagttaaaataaggctagtccgttatcacgaaagggcaccgagtcggtgct

SEQ ID NO: 344 - RNA, 91 nt, synthetic construct; identical to SEQ ID NO: 343
  source 1..91: mol_type = other RNA
  modified_base 1: mod_base = OTHER; note = 2'-O-methyl modified nucleotide with phosphorothioate linkage
  modified_base 2: mod_base = OTHER; note = 2'-O-methyl modified nucleotide with phosphorothioate linkage
  modified_base 3: mod_base = OTHER; note = 2'-O-methyl modified nucleotide with phosphorothioate linkage
  modified_base 29: mod_base = OTHER; note = 2'-O-methyl modified nucleotide
  modified_base 30: mod_base = OTHER; note = 2'-O-methyl modified nucleotide
  modified_base 31: mod_base = OTHER; note = 2'-O-methyl modified nucleotide
  modified_base 32: mod_base = OTHER; note = 2'-O-methyl modified nucleotide
  modified_base 33: mod_base = OTHER; note = 2'-O-methyl modified nucleotide
  modified_base 34: mod_base = OTHER; note = 2'-O-methyl modified nucleotide
  modified_base 35: mod_base = OTHER; note = 2'-O-methyl modified nucleotide
  modified_base 36: mod_base = OTHER; note = 2'-O-methyl modified nucleotide
  modified_base 37: mod_base = OTHER; note = 2'-O-methyl modified nucleotide
  modified_base 38: mod_base = OTHER; note = 2'-O-methyl modified nucleotide
  modified_base 39: mod_base = OTHER; note = 2'-O-methyl modified nucleotide
  modified_base 40: mod_base = OTHER; note = 2'-O-methyl modified nucleotide
  modified_base 88: mod_base = OTHER; note = 2'-O-methyl modified nucleotide
  modified_base 89: mod_base = OTHER; note = 2'-O-methyl modified nucleotide
  modified_base 90: mod_base = OTHER; note = 2'-O-methyl modified nucleotide with phosphorothioate linkage
  modified_base 91: mod_base = OTHER; note = 2'-O-methyl modified nucleotide

SEQ ID NO: 345 - RNA, 24 nt, synthetic construct
  source 1..24: mol_type = other RNA
tcaaagtaccctacaggaggacca

SEQ ID NO: 346 - RNA, 101 nt, synthetic construct
  source 1..101: mol_type = other RNA
tcaaagtaccctacaggaggaccagttgtagctccctgaaaccgttgctacaataaggccgtcgaaagatgtgccgcaacgctctgccttctggcatcgtt

SEQ ID NO: 347 - RNA, 101 nt, synthetic construct; identical to SEQ ID NO: 346
  source 1..101: mol_type = other RNA
  modified_base 1: mod_base = OTHER; note = 2'-O-methyl modified nucleotide with phosphorothioate linkage
  modified_base 2: mod_base = OTHER; note = 2'-O-methyl modified nucleotide with phosphorothioate linkage
  modified_base 3: mod_base = OTHER; note = 2'-O-methyl modified nucleotide with phosphorothioate linkage
  modified_base 4: mod_base = OTHER; note = 2'-O-methyl modified nucleotide
  modified_base 5: mod_base = OTHER; note = 2'-O-methyl modified nucleotide
  modified_base 8: mod_base = OTHER; note = 2'-O-methyl modified nucleotide
  modified_base 9: mod_base = OTHER; note = 2'-O-methyl modified nucleotide
  modified_base 11: mod_base = OTHER; note = 2'-O-methyl modified nucleotide
  modified_base 13: mod_base = OTHER; note = 2'-O-methyl modified nucleotide
  modified_base 18: mod_base = OTHER; note = 2'-O-methyl modified nucleotide
  modified_base 22: mod_base = OTHER; note = 2'-O-methyl modified nucleotide
  modified_base 25: mod_base = OTHER; note = 2'-O-methyl modified nucleotide
  modified_base 29: mod_base = OTHER; note = 2'-O-methyl modified nucleotide
  modified_base 30: mod_base = OTHER; note = 2'-O-methyl modified nucleotide
  modified_base 31: mod_base = OTHER; note = 2'-O-methyl modified nucleotide
  modified_base 32: mod_base = OTHER; note = 2'-O-methyl modified nucleotide
  modified_base 37: mod_base = OTHER; note = 2'-O-methyl modified nucleotide
  modified_base 38: mod_base = OTHER; note = 2'-O-methyl modified nucleotide
  modified_base 39: mod_base = OTHER; note = 2'-O-methyl modified nucleotide
  modified_base 40: mod_base = OTHER; note = 2'-O-methyl modified nucleotide
  modified_base 41: mod_base = OTHER; note = 2'-O-methyl modified nucleotide
  modified_base 42: mod_base = OTHER; note = 2'-O-methyl modified nucleotide
  modified_base 43: mod_base = OTHER; note = 2'-O-methyl modified nucleotide
  modified_base 47: mod_base = OTHER; note = 2'-O-methyl modified nucleotide
  modified_base 48: mod_base = OTHER; note = 2'-O-methyl modified nucleotide
  modified_base 51: mod_base = OTHER; note = 2'-O-methyl modified nucleotide
  modified_base 54: mod_base = OTHER; note = Nucleotide with phosphorothioate linkage
  modified_base 58: mod_base = OTHER; note = 2'-O-methyl modified nucleotide
  modified_base 59: mod_base = OTHER; note = 2'-O-methyl modified nucleotide
  modified_base 61: mod_base = OTHER; note = 2'-O-methyl modified nucleotide
  modified_base 62: mod_base = OTHER; note = 2'-O-methyl modified nucleotide
  modified_base 63: mod_base = OTHER; note = 2'-O-methyl modified nucleotide
  modified_base 64: mod_base = OTHER; note = 2'-O-methyl modified nucleotide
  modified_base 65: mod_base = OTHER; note = 2'-O-methyl modified nucleotide
  modified_base 66: mod_base = OTHER; note = 2'-O-methyl modified nucleotide
  modified_base 67: mod_base = OTHER; note = 2'-O-methyl modified nucleotide
  modified_base 68: mod_base = OTHER; note = 2'-O-methyl modified nucleotide
  modified_base 69: mod_base = OTHER; note = 2'-O-methyl modified nucleotide
  modified_base 70: mod_base = OTHER; note = 2'-O-methyl modified nucleotide
  modified_base 75: mod_base = OTHER; note = 2'-O-methyl modified nucleotide
  modified_base 77: mod_base = OTHER; note = 2'-O-methyl modified nucleotide
  modified_base 80: mod_base = OTHER; note = 2'-O-methyl modified nucleotide
  modified_base 86: mod_base = OTHER; note = 2'-O-methyl modified nucleotide
  modified_base 87: mod_base = OTHER; note = 2'-O-methyl modified nucleotide
  modified_base 89: mod_base = OTHER; note = 2'-O-methyl modified nucleotide
  modified_base 90: mod_base = OTHER; note = 2'-O-methyl modified nucleotide
  modified_base 91: mod_base = OTHER; note = 2'-O-methyl modified nucleotide
  modified_base 92: mod_base = OTHER; note = 2'-O-methyl modified nucleotide
  modified_base 99: mod_base = OTHER; note = Nucleotide with phosphorothioate linkage
  modified_base 100: mod_base = OTHER; note = 2'-O-methyl modified nucleotide with phosphorothioate linkage
  modified_base 101: mod_base = OTHER; note = 2'-O-methyl modified nucleotide

SEQ ID NO: 348 - RNA, 20 nt, synthetic construct
  source 1..20: mol_type = other RNA
ttcaaaacctgtcagtgatt

SEQ ID NO: 349 - RNA, 91 nt, synthetic construct; identical to SEQ ID NO: 334
  source 1..91: mol_type = other RNA

SEQ ID NO: 350 - RNA, 91 nt, synthetic construct; identical to SEQ ID NO: 334
  source 1..91: mol_type = other RNA
  modified_base 1: mod_base = OTHER; note = 2'-O-methyl modified nucleotide with phosphorothioate linkage
  modified_base 2: mod_base = OTHER; note = 2'-O-methyl modified nucleotide with phosphorothioate linkage
  modified_base 3: mod_base = OTHER; note = 2'-O-methyl modified nucleotide with phosphorothioate linkage
  modified_base 29: mod_base = OTHER; note = 2'-O-methyl modified nucleotide
  modified_base 30: mod_base = OTHER; note = 2'-O-methyl modified nucleotide
  modified_base 31: mod_base = OTHER; note = 2'-O-methyl modified nucleotide
  modified_base 32: mod_base = OTHER; note = 2'-O-methyl modified nucleotide
  modified_base 33: mod_base = OTHER; note = 2'-O-methyl modified nucleotide
  modified_base 34: mod_base = OTHER; note = 2'-O-methyl modified nucleotide
  modified_base 35: mod_base = OTHER; note = 2'-O-methyl modified nucleotide
  modified_base 36: mod_base = OTHER; note = 2'-O-methyl modified nucleotide
  modified_base 37: mod_base = OTHER; note = 2'-O-methyl modified nucleotide
  modified_base 38: mod_base = OTHER; note = 2'-O-methyl modified nucleotide
  modified_base 39: mod_base = OTHER; note = 2'-O-methyl modified nucleotide
  modified_base 40: mod_base = OTHER; note = 2'-O-methyl modified nucleotide
  modified_base 88: mod_base = OTHER; note = 2'-O-methyl modified nucleotide with phosphorothioate linkage
  modified_base 89: mod_base = OTHER; note = 2'-O-methyl modified nucleotide with phosphorothioate linkage
  modified_base 90: mod_base = OTHER; note = 2'-O-methyl modified nucleotide with phosphorothioate linkage
  modified_base 91: mod_base = OTHER; note = 2'-O-methyl modified nucleotide

SEQ ID NO: 351 - RNA, 20 nt, synthetic construct
  source 1..20: mol_type = other RNA
ccacacccaaaaggccacac

SEQ ID NO: 352 - RNA, 91 nt, synthetic construct; identical to SEQ ID NO: 343
  source 1..91: mol_type = other RNA

SEQ ID NO: 353 - RNA, 91 nt, synthetic construct; identical to SEQ ID NO: 343
  source 1..91: mol_type = other RNA
  modified_base 1: mod_base = OTHER; note = 2'-O-methyl modified nucleotide with phosphorothioate linkage
  modified_base 2: mod_base = OTHER; note = 2'-O-methyl modified nucleotide with phosphorothioate linkage
  modified_base 3: mod_base = OTHER; note = 2'-O-methyl modified nucleotide with phosphorothioate linkage
  modified_base 29: mod_base = OTHER; note = 2'-O-methyl modified nucleotide
  modified_base 30: mod_base = OTHER; note = 2'-O-methyl modified nucleotide
  modified_base 31: mod_base = OTHER; note = 2'-O-methyl modified nucleotide
  modified_base 32: mod_base = OTHER; note = 2'-O-methyl modified nucleotide
  modified_base 33: mod_base = OTHER; note = 2'-O-methyl modified nucleotide
  modified_base 34: mod_base = OTHER; note = 2'-O-methyl modified nucleotide
  modified_base 35: mod_base = OTHER; note = 2'-O-methyl modified nucleotide
  modified_base 36: mod_base = OTHER; note = 2'-O-methyl modified nucleotide
  modified_base 37: mod_base = OTHER; note = 2'-O-methyl modified nucleotide
  modified_base 38: mod_base = OTHER; note = 2'-O-methyl modified nucleotide
  modified_base 39: mod_base = OTHER; note = 2'-O-methyl modified nucleotide
  modified_base 40: mod_base = OTHER; note = 2'-O-methyl modified nucleotide
  modified_base 88: mod_base = OTHER; note = 2'-O-methyl modified nucleotide with phosphorothioate linkage
  modified_base 89: mod_base = OTHER; note = 2'-O-methyl modified nucleotide with phosphorothioate linkage
  modified_base 90: mod_base = OTHER; note = 2'-O-methyl modified nucleotide with phosphorothioate linkage
  modified_base 91: mod_base = OTHER; note = 2'-O-methyl modified nucleotide

SEQ ID NO: 354 - RNA, 20 nt, synthetic construct
  source 1..20: mol_type = other RNA
cgcccaggtcctcacgtctg

SEQ ID NO: 355 - RNA, 91 nt, synthetic construct; identical to SEQ ID NO: 337
  source 1..91: mol_type = other RNA

SEQ ID NO: 356 - RNA, 91 nt, synthetic construct; identical to SEQ ID NO: 337
  source 1..91: mol_type = other RNA
  modified_base 1: mod_base = OTHER; note = 2'-O-methyl modified nucleotide with phosphorothioate linkage
  modified_base 2: mod_base = OTHER; note = 2'-O-methyl modified nucleotide with phosphorothioate linkage
  modified_base 3: mod_base = OTHER; note = 2'-O-methyl modified nucleotide with phosphorothioate linkage
  modified_base 29: mod_base = OTHER; note = 2'-O-methyl modified nucleotide
  modified_base 30: mod_base = OTHER; note = 2'-O-methyl modified nucleotide
  modified_base 31: mod_base = OTHER; note = 2'-O-methyl modified nucleotide
  modified_base 32: mod_base = OTHER; note = 2'-O-methyl modified nucleotide
  modified_base 33: mod_base = OTHER; note = 2'-O-methyl modified nucleotide
  modified_base 34: mod_base = OTHER; note = 2'-O-methyl modified nucleotide
  modified_base 35: mod_base = OTHER; note = 2'-O-methyl modified nucleotide
  modified_base 36: mod_base = OTHER; note = 2'-O-methyl modified nucleotide
  modified_base 37: mod_base = OTHER; note = 2'-O-methyl modified nucleotide
  modified_base 38: mod_base = OTHER; note = 2'-O-methyl modified nucleotide
  modified_base 39: mod_base = OTHER; note = 2'-O-methyl modified nucleotide
  modified_base 40: mod_base = OTHER; note = 2'-O-methyl modified nucleotide
  modified_base 88: mod_base = OTHER; note = 2'-O-methyl modified nucleotide with phosphorothioate linkage
  modified_base 89: mod_base = OTHER; note = 2'-O-methyl modified nucleotide with phosphorothioate linkage
  modified_base 90: mod_base = OTHER; note = 2'-O-methyl modified nucleotide with phosphorothioate linkage
  modified_base 91: mod_base = OTHER; note = 2'-O-methyl modified nucleotide

SEQ ID NO: 357 - RNA, 20 nt, synthetic construct
  source 1..20: mol_type = other RNA
gctgcagcgcacgggtacca

SEQ ID NO: 358 - RNA, 91 nt, synthetic construct; identical to SEQ ID NO: 340
  source 1..91: mol_type = other RNA

SEQ ID NO: 359 - RNA, 91 nt, synthetic construct; identical to SEQ ID NO: 340
  source 1..91: mol_type = other RNA
  modified_base 1: mod_base = OTHER; note = 2'-O-methyl modified nucleotide with phosphorothioate linkage
  modified_base 2: mod_base = OTHER; note = 2'-O-methyl modified nucleotide with phosphorothioate linkage
  modified_base 3: mod_base = OTHER; note = 2'-O-methyl modified nucleotide with phosphorothioate linkage
  modified_base 29: mod_base = OTHER; note = 2'-O-methyl modified nucleotide
  modified_base 30: mod_base = OTHER; note = 2'-O-methyl modified nucleotide
  modified_base 31: mod_base = OTHER; note = 2'-O-methyl modified nucleotide
  modified_base 32: mod_base = OTHER; note = 2'-O-methyl modified nucleotide
  modified_base 33: mod_base = OTHER; note = 2'-O-methyl modified nucleotide
  modified_base 34: mod_base = OTHER; note = 2'-O-methyl modified nucleotide
  modified_base 35: mod_base = OTHER; note = 2'-O-methyl modified nucleotide
  modified_base 36: mod_base = OTHER; note = 2'-O-methyl modified nucleotide
  modified_base 37: mod_base = OTHER; note = 2'-O-methyl modified nucleotide
  modified_base 38: mod_base = OTHER; note = 2'-O-methyl modified nucleotide
  modified_base 39: mod_base = OTHER; note = 2'-O-methyl modified nucleotide
  modified_base 40: mod_base = OTHER; note = 2'-O-methyl modified nucleotide
  modified_base 88: mod_base = OTHER; note = 2'-O-methyl modified nucleotide with phosphorothioate linkage
  modified_base 89: mod_base = OTHER; note = 2'-O-methyl modified nucleotide with phosphorothioate linkage
  modified_base 90: mod_base = OTHER; note = 2'-O-methyl modified nucleotide with phosphorothioate linkage
  modified_base 91: mod_base = OTHER; note = 2'-O-methyl modified nucleotide

SEQ ID NO: 360 - RNA, 24 nt, synthetic construct
  source 1..24: mol_type = other RNA
tcctgctctatccacggcgcccgc

SEQ ID NO: 361 - RNA, 101 nt, synthetic construct
  source 1..101: mol_type = other RNA
tcctgctctatccacggcgcccgcgttgtagctccctgaaaccgttgctacaataaggccgtcgaaagatgtgccgcaacgctctgccttctggcatcgtt

SEQ ID NO: 362 - RNA, 101 nt, synthetic construct; identical to SEQ ID NO: 361
  source 1..101: mol_type = other RNA
  modified_base 1: mod_base = OTHER; note = 2'-O-methyl modified nucleotide with phosphorothioate linkage
  modified_base 2: mod_base = OTHER; note = 2'-O-methyl modified nucleotide with phosphorothioate linkage
  modified_base 3: mod_base = OTHER; note = 2'-O-methyl modified nucleotide with phosphorothioate linkage
  modified_base 4: mod_base = OTHER; note = 2'-O-methyl modified nucleotide
  modified_base 5: mod_base = OTHER; note = 2'-O-methyl modified nucleotide
  modified_base 8: mod_base = OTHER; note = 2'-O-methyl modified nucleotide
  modified_base 9: mod_base = OTHER; note = 2'-O-methyl modified nucleotide
  modified_base 11: mod_base = OTHER; note = 2'-O-methyl modified nucleotide
  modified_base 13: mod_base = OTHER; note = 2'-O-methyl modified nucleotide
  modified_base 18: mod_base = OTHER; note = 2'-O-methyl modified nucleotide
  modified_base 22: mod_base = OTHER; note = 2'-O-methyl modified nucleotide
  modified_base 25: mod_base = OTHER; note = 2'-O-methyl modified nucleotide
  modified_base 29: mod_base = OTHER; note = 2'-O-methyl modified nucleotide
  modified_base 30: mod_base = OTHER; note = 2'-O-methyl modified nucleotide
  modified_base 31: mod_base = OTHER; note = 2'-O-methyl modified nucleotide
  modified_base 32: mod_base = OTHER; note = 2'-O-methyl modified nucleotide
  modified_base 37: mod_base = OTHER; note = 2'-O-methyl modified nucleotide
  modified_base 38: mod_base = OTHER; note = 2'-O-methyl modified nucleotide
  modified_base 39: mod_base = OTHER; note = 2'-O-methyl modified nucleotide
  modified_base 40: mod_base = OTHER; note = 2'-O-methyl modified nucleotide
  modified_base 41: mod_base = OTHER; note = 2'-O-methyl modified nucleotide
  modified_base 42: mod_base = OTHER; note = 2'-O-methyl modified nucleotide
  modified_base 43: mod_base = OTHER; note = 2'-O-methyl modified nucleotide
  modified_base 47: mod_base = OTHER; note = 2'-O-methyl modified nucleotide
  modified_base 48: mod_base = OTHER; note = 2'-O-methyl modified nucleotide
  modified_base 51: mod_base = OTHER; note = 2'-O-methyl modified nucleotide
  modified_base 54: mod_base = OTHER; note = Nucleotide with phosphorothioate linkage
  modified_base 58: mod_base = OTHER; note = 2'-O-methyl modified nucleotide
  modified_base 59: mod_base = OTHER; note = 2'-O-methyl modified nucleotide
  modified_base 61: mod_base = OTHER; note = 2'-O-methyl modified nucleotide
  modified_base 62: mod_base = OTHER; note = 2'-O-methyl modified nucleotide
  modified_base 63: mod_base = OTHER; note = 2'-O-methyl modified nucleotide
  modified_base 64: mod_base = OTHER; note = 2'-O-methyl modified nucleotide
  modified_base 65: mod_base = OTHER; note = 2'-O-methyl modified nucleotide
  modified_base 66: mod_base = OTHER; note = 2'-O-methyl modified nucleotide
  modified_base 67: mod_base = OTHER; note = 2'-O-methyl modified nucleotide
  modified_base 68: mod_base = OTHER; note = 2'-O-methyl modified nucleotide
  modified_base 69: mod_base = OTHER; note = 2'-O-methyl modified nucleotide
  modified_base 70: mod_base = OTHER; note = 2'-O-methyl modified nucleotide
  modified_base 75: mod_base = OTHER; note = 2'-O-methyl modified nucleotide
  modified_base 77: mod_base = OTHER; note = 2'-O-methyl modified nucleotide
  modified_base 80: mod_base = OTHER; note = 2'-O-methyl modified nucleotide
  modified_base 86: mod_base = OTHER; note = 2'-O-methyl modified nucleotide
  modified_base 87: mod_base = OTHER; note = 2'-O-methyl modified nucleotide
  modified_base 89: mod_base = OTHER; note = 2'-O-methyl modified nucleotide
  modified_base 90: mod_base = OTHER; note = 2'-O-methyl modified nucleotide
  modified_base 91: mod_base = OTHER; note = 2'-O-methyl modified nucleotide
  modified_base 92: mod_base = OTHER; note = 2'-O-methyl modified nucleotide
  modified_base 99: mod_base = OTHER; note = Nucleotide with phosphorothioate linkage
  modified_base 100: mod_base = OTHER; note = 2'-O-methyl modified nucleotide with phosphorothioate linkage
  modified_base 101: mod_base = OTHER; note = 2'-O-methyl modified nucleotide

SEQ ID NO: 363 - RNA, 24 nt, synthetic construct
  source 1..24: mol_type = other RNA
gtgtcctaccagcaaggggtcctg

SEQ ID NO: 364 - RNA, 101 nt, synthetic construct
  source 1..101: mol_type = other RNA
gtgtcctaccagcaaggggtcctggttgtagctccctgaaaccgttgctacaataaggccgtcgaaagatgtgccgcaacgctctgccttctggcatcgtt

SEQ ID NO: 365 - RNA, 101 nt, synthetic construct; identical to SEQ ID NO: 364
  source 1..101: mol_type = other RNA
  modified_base 1: mod_base = OTHER; note = 2'-O-methyl modified nucleotide with phosphorothioate linkage
  modified_base 2: mod_base = OTHER; note = 2'-O-methyl modified nucleotide with phosphorothioate linkage
  modified_base 3: mod_base = OTHER; note = 2'-O-methyl modified nucleotide with phosphorothioate linkage
  modified_base 4: mod_base = OTHER; note = 2'-O-methyl modified nucleotide
  modified_base 5: mod_base = OTHER; note = 2'-O-methyl modified nucleotide
  modified_base 8: mod_base = OTHER; note = 2'-O-methyl modified nucleotide
  modified_base 9: mod_base = OTHER; note = 2'-O-methyl modified nucleotide
  modified_base 11: mod_base = OTHER; note = 2'-O-methyl modified nucleotide
  modified_base 13: mod_base = OTHER; note = 2'-O-methyl modified nucleotide
  modified_base 18: mod_base = OTHER; note = 2'-O-methyl modified nucleotide
  modified_base 22: mod_base = OTHER; note = 2'-O-methyl modified nucleotide
  modified_base 25: mod_base = OTHER; note = 2'-O-methyl modified nucleotide
  modified_base 29: mod_base = OTHER; note = 2'-O-methyl modified nucleotide
  modified_base 30: mod_base = OTHER; note = 2'-O-methyl modified nucleotide
  modified_base 31: mod_base = OTHER; note = 2'-O-methyl modified nucleotide
  modified_base 32: mod_base = OTHER; note = 2'-O-methyl modified nucleotide
  modified_base 37: mod_base = OTHER; note = 2'-O-methyl modified nucleotide
  modified_base 38: mod_base = OTHER; note = 2'-O-methyl modified nucleotide
  modified_base 39: mod_base = OTHER; note = 2'-O-methyl modified nucleotide
  modified_base 40: mod_base = OTHER; note = 2'-O-methyl modified nucleotide
  modified_base 41: mod_base = OTHER; note = 2'-O-methyl modified nucleotide
  modified_base 42: mod_base = OTHER; note = 2'-O-methyl modified nucleotide
  modified_base 43: mod_base = OTHER; note = 2'-O-methyl modified nucleotide
  modified_base 47: mod_base = OTHER; note = 2'-O-methyl modified nucleotide
  modified_base 48: mod_base = OTHER; note = 2'-O-methyl modified nucleotide
  modified_base 51: mod_base = OTHER; note = 2'-O-methyl modified nucleotide
  modified_base 54: mod_base = OTHER; note = Nucleotide with phosphorothioate linkage
  modified_base 58: mod_base = OTHER; note = 2'-O-methyl modified nucleotide
  modified_base 59: mod_base = OTHER; note = 2'-O-methyl modified nucleotide
  modified_base 61: mod_base = OTHER; note = 2'-O-methyl modified nucleotide
  modified_base 62: mod_base = OTHER; note = 2'-O-methyl modified nucleotide
  modified_base 63: mod_base = OTHER; note = 2'-O-methyl modified nucleotide
  modified_base 64: mod_base = OTHER; note = 2'-O-methyl modified nucleotide
  modified_base 65: mod_base = OTHER; note = 2'-O-methyl modified nucleotide
  modified_base 66: mod_base = OTHER; note = 2'-O-methyl modified nucleotide
  modified_base 67: mod_base = OTHER; note = 2'-O-methyl modified nucleotide
  modified_base 68: mod_base = OTHER; note = 2'-O-methyl modified nucleotide
  modified_base 69: mod_base = OTHER; note = 2'-O-methyl modified nucleotide
  modified_base 70: mod_base = OTHER; note = 2'-O-methyl modified nucleotide
  modified_base 75: mod_base = OTHER; note = 2'-O-methyl modified nucleotide
  modified_base 77: mod_base = OTHER; note = 2'-O-methyl modified nucleotide
  modified_base 80: mod_base = OTHER; note = 2'-O-methyl modified nucleotide
  modified_base 86: mod_base = OTHER; note = 2'-O-methyl modified nucleotide
  modified_base 87: mod_base = OTHER; note = 2'-O-methyl modified nucleotide
  modified_base 89: mod_base = OTHER; note = 2'-O-methyl modified nucleotide
  modified_base 90: mod_base = OTHER; note = 2'-O-methyl modified nucleotide
  modified_base 91: mod_base = OTHER; note = 2'-O-methyl modified nucleotide
  modified_base 92: mod_base = OTHER; note = 2'-O-methyl modified nucleotide
  modified_base 99: mod_base = OTHER; note = Nucleotide with phosphorothioate linkage
  modified_base 100: mod_base = OTHER; note = 2'-O-methyl modified nucleotide with phosphorothioate linkage
  modified_base 101: mod_base = OTHER; note = 2'-O-methyl modified nucleotide

SEQ ID NO: 366 - RNA, 24 nt, synthetic construct
  source 1..24: mol_type = other RNA
gctctatccacggcgcccgcggct

SEQ ID NO: 367 - RNA, 101 nt, synthetic construct
  source 1..101: mol_type = other RNA
gctctatccacggcgcccgcggctgttgtagctccctgaaaccgttgctacaataaggccgtcgaaagatgtgccgcaacgctctgccttctggcatcgtt

SEQ ID NO: 368 - RNA, 101 nt, synthetic construct; identical to SEQ ID NO: 367
  source 1..101: mol_type = other RNA
  modified_base 1: mod_base = OTHER; note = 2'-O-methyl modified nucleotide with phosphorothioate linkage
  modified_base 2: mod_base = OTHER; note = 2'-O-methyl modified nucleotide with phosphorothioate linkage
  modified_base 3: mod_base = OTHER; note = 2'-O-methyl modified nucleotide with phosphorothioate linkage
  modified_base 4: mod_base = OTHER; note = 2'-O-methyl modified nucleotide
  modified_base 5: mod_base = OTHER; note = 2'-O-methyl modified nucleotide
  modified_base 8: mod_base = OTHER; note = 2'-O-methyl modified nucleotide
  modified_base 9: mod_base = OTHER; note = 2'-O-methyl modified nucleotide
  modified_base 11: mod_base = OTHER; note = 2'-O-methyl modified nucleotide
  modified_base 13: mod_base = OTHER; note = 2'-O-methyl modified nucleotide
  modified_base 18: mod_base = OTHER; note = 2'-O-methyl modified nucleotide
  modified_base 22: mod_base = OTHER; note = 2'-O-methyl modified nucleotide
  modified_base 25: mod_base = OTHER; note = 2'-O-methyl modified nucleotide
  modified_base 29: mod_base = OTHER; note = 2'-O-methyl modified nucleotide
  modified_base 30: mod_base = OTHER; note = 2'-O-methyl modified nucleotide
  modified_base 31: mod_base = OTHER; note = 2'-O-methyl modified nucleotide
  modified_base 32: mod_base = OTHER; note = 2'-O-methyl modified nucleotide
  modified_base 37: mod_base = OTHER; note = 2'-O-methyl modified nucleotide
  modified_base 38: mod_base = OTHER; note = 2'-O-methyl modified nucleotide
  modified_base 39: mod_base = OTHER; note = 2'-O-methyl modified nucleotide
  modified_base 40: mod_base = OTHER; note = 2'-O-methyl modified nucleotide
  modified_base 41: mod_base = OTHER; note = 2'-O-methyl modified nucleotide
  modified_base 42: mod_base = OTHER; note = 2'-O-methyl modified nucleotide
  modified_base 43: mod_base = OTHER; note = 2'-O-methyl modified nucleotide
  modified_base 47: mod_base = OTHER; note = 2'-O-methyl modified nucleotide
  modified_base 48: mod_base = OTHER; note = 2'-O-methyl modified nucleotide
  modified_base 51: mod_base = OTHER; note = 2'-O-methyl modified nucleotide
  modified_base 54: mod_base = OTHER; note = Nucleotide with phosphorothioate linkage
  modified_base 58: mod_base = OTHER; note = 2'-O-methyl modified nucleotide
  modified_base 59: mod_base = OTHER; note = 2'-O-methyl modified nucleotide
  modified_base 61: mod_base = OTHER; note = 2'-O-methyl modified nucleotide
  modified_base 62: mod_base = OTHER; note = 2'-O-methyl modified nucleotide
  modified_base 63: mod_base = OTHER; note = 2'-O-methyl modified nucleotide
  modified_base 64: mod_base = OTHER; note = 2'-O-methyl modified nucleotide
  modified_base 65: mod_base = OTHER; note = 2'-O-methyl modified nucleotide
  modified_base 66: mod_base = OTHER; note = 2'-O-methyl modified nucleotide
  modified_base 67: mod_base = OTHER; note = 2'-O-methyl modified nucleotide
  modified_base 68: mod_base = OTHER; note = 2'-O-methyl modified nucleotide
  modified_base 69: mod_base = OTHER; note = 2'-O-methyl modified nucleotide
  modified_base 70: mod_base = OTHER; note = 2'-O-methyl modified nucleotide
  modified_base 75: mod_base = OTHER; note = 2'-O-methyl modified nucleotide
  modified_base 77: mod_base = OTHER; note = 2'-O-methyl modified nucleotide
  modified_base 80: mod_base = OTHER; note = 2'-O-methyl modified nucleotide
  modified_base 86: mod_base = OTHER; note = 2'-O-methyl modified nucleotide
  modified_base 87: mod_base = OTHER; note = 2'-O-methyl modified nucleotide
  modified_base 89: mod_base = OTHER; note = 2'-O-methyl modified nucleotide
  modified_base 90: mod_base = OTHER; note = 2'-O-methyl modified nucleotide
  modified_base 91: mod_base = OTHER; note = 2'-O-methyl modified nucleotide
  modified_base 92: mod_base = OTHER; note = 2'-O-methyl modified nucleotide
  modified_base 99: mod_base = OTHER; note = Nucleotide with phosphorothioate linkage
  modified_base 100: mod_base = OTHER; note = 2'-O-methyl modified nucleotide with phosphorothioate linkage
  modified_base 101: mod_base = OTHER; note = 2'-O-methyl modified nucleotide

SEQ ID NO: 369 - RNA, 101 nt, synthetic construct; identical to SEQ ID NO: 367
  source 1..101: mol_type = other RNA
  modified_base 1: mod_base = OTHER; note = 2'-O-methyl modified nucleotide with phosphorothioate linkage
  modified_base 2: mod_base = OTHER; note = 2'-O-methyl modified nucleotide with phosphorothioate linkage
  modified_base 3: mod_base = OTHER; note = 2'-O-methyl modified nucleotide with phosphorothioate linkage
  modified_base 4: mod_base = OTHER; note = 2'-O-methyl modified nucleotide
  modified_base 5: mod_base = OTHER; note = 2'-O-methyl modified nucleotide
  modified_base 8: mod_base = OTHER; note = 2'-O-methyl modified nucleotide
  modified_base 9: mod_base = OTHER; note = 2'-O-methyl modified nucleotide
  modified_base 11: mod_base = OTHER; note = 2'-O-methyl modified nucleotide
  modified_base 13: mod_base = OTHER; note = 2'-O-methyl modified nucleotide
  modified_base 18: mod_base = OTHER; note = 2'-O-methyl modified nucleotide
  modified_base 22: mod_base = OTHER; note = 2'-O-methyl modified nucleotide
  modified_base 25: mod_base = OTHER; note = 2'-O-methyl modified nucleotide
  modified_base 29: mod_base = OTHER; note = 2'-O-methyl modified nucleotide
  modified_base 30: mod_base = OTHER; note = 2'-O-methyl modified nucleotide
  modified_base 31: mod_base = OTHER; note = 2'-O-methyl modified nucleotide
  modified_base 32: mod_base = OTHER; note = 2'-O-methyl modified nucleotide
  modified_base 37: mod_base = OTHER; note = 2'-O-methyl modified nucleotide
  modified_base 38: mod_base = OTHER; note = 2'-O-methyl modified nucleotide
  modified_base 39: mod_base = OTHER; note = 2'-O-methyl modified nucleotide
  modified_base 40: mod_base = OTHER; note = 2'-O-methyl modified nucleotide
  modified_base 41: mod_base = OTHER; note = 2'-O-methyl modified nucleotide
  modified_base 42: mod_base = OTHER; note = 2'-O-methyl modified nucleotide
  modified_base 43: mod_base = OTHER; note = 2'-O-methyl modified nucleotide
  modified_base 47: mod_base = OTHER; note = 2'-O-methyl modified nucleotide
  modified_base 48: mod_base = OTHER; note = 2'-O-methyl modified nucleotide
  modified_base 51: mod_base = OTHER; note = 2'-O-methyl modified nucleotide
  modified_base 58: mod_base = OTHER; note = 2'-O-methyl modified nucleotide
  modified_base 59: mod_base = OTHER; note = 2'-O-methyl modified nucleotide
  modified_base 61: mod_base = OTHER; note = 2'-O-methyl modified nucleotide
  modified_base 62: mod_base = OTHER; note = 2'-O-methyl modified nucleotide
  modified_base 63: mod_base = OTHER; note = 2'-O-methyl modified nucleotide
  modified_base 64: mod_base = OTHER; note = 2'-O-methyl modified nucleotide
  modified_base 65: mod_base = OTHER; note = 2'-O-methyl modified nucleotide
  modified_base 66: mod_base = OTHER; note = 2'-O-methyl modified nucleotide
  modified_base 67: mod_base = OTHER; note = 2'-O-methyl modified nucleotide
  modified_base 68: mod_base = OTHER; note = 2'-O-methyl modified nucleotide
  modified_base 69: mod_base = OTHER; note = 2'-O-methyl modified nucleotide
  modified_base 70: mod_base = OTHER; note = 2'-O-methyl modified nucleotide
  modified_base 75: mod_base = OTHER; note = 2'-O-methyl modified nucleotide
  modified_base 77: mod_base = OTHER; note = 2'-O-methyl modified nucleotide
  modified_base 80: mod_base = OTHER; note = 2'-O-methyl modified nucleotide
  modified_base 86: mod_base = OTHER; note = 2'-O-methyl modified nucleotide
  modified_base 87: mod_base = OTHER; note = 2'-O-methyl modified nucleotide
  modified_base 89: mod_base = OTHER; note = 2'-O-methyl modified nucleotide
  modified_base 90: mod_base = OTHER; note = 2'-O-methyl modified nucleotide
  modified_base 91: mod_base = OTHER; note = 2'-O-methyl modified nucleotide
  modified_base 92: mod_base = OTHER; note = 2'-O-methyl modified nucleotide
  modified_base 99: mod_base = OTHER; note = Nucleotide with phosphorothioate linkage
  modified_base 100: mod_base = OTHER; note = 2'-O-methyl modified nucleotide with phosphorothioate linkage
  modified_base 101: mod_base = OTHER; note = 2'-O-methyl modified nucleotide

SEQ ID NO: 370 - RNA, 24 nt, synthetic construct
  source 1..24: mol_type = other RNA
cactcacccgcccaggtctgggtc

SEQ ID NO: 371 - RNA, 101 nt, synthetic construct
  source 1..101: mol_type = other RNA
cactcacccgcccaggtctgggtcgttgtagctccctgaaaccgttgctacaataaggccgtcgaaagatgtgccgcaacgctctgccttctggcatcgtt

SEQ ID NO: 372 - RNA, 101 nt, synthetic construct; identical to SEQ ID NO: 371
  source 1..101: mol_type = other RNA
  modified_base 1: mod_base = OTHER; note = 2'-O-methyl modified nucleotide with phosphorothioate linkage
  modified_base 2: mod_base = OTHER; note = 2'-O-methyl modified nucleotide with phosphorothioate linkage
  modified_base 3: mod_base = OTHER; note = 2'-O-methyl modified nucleotide with phosphorothioate linkage
  modified_base 4: mod_base = OTHER; note = 2'-O-methyl modified nucleotide
  modified_base 5: mod_base = OTHER; note = 2'-O-methyl modified nucleotide
  modified_base 8: mod_base = OTHER; note = 2'-O-methyl modified nucleotide
  modified_base 9: mod_base = OTHER; note = 2'-O-methyl modified nucleotide
  modified_base 11: mod_base = OTHER; note = 2'-O-methyl modified nucleotide
  modified_base 13: mod_base = OTHER; note = 2'-O-methyl modified nucleotide
  modified_base 18: mod_base = OTHER; note = 2'-O-methyl modified nucleotide
  modified_base 22: mod_base = OTHER; note = 2'-O-methyl modified nucleotide
  modified_base 25: mod_base = OTHER; note = 2'-O-methyl modified nucleotide
  modified_base 29: mod_base = OTHER; note = 2'-O-methyl modified nucleotide
  modified_base 30: mod_base = OTHER; note = 2'-O-methyl modified nucleotide
  modified_base 31: mod_base = OTHER; note = 2'-O-methyl modified nucleotide
  modified_base 32: mod_base = OTHER; note = 2'-O-methyl modified nucleotide
  modified_base 37: mod_base = OTHER; note = 2'-O-methyl modified nucleotide
  modified_base 38: mod_base = OTHER; note = 2'-O-methyl modified nucleotide
  modified_base 39: mod_base = OTHER; note = 2'-O-methyl modified nucleotide
  modified_base 40: mod_base = OTHER; note = 2'-O-methyl modified nucleotide
  modified_base 41: mod_base = OTHER; note = 2'-O-methyl modified nucleotide
  modified_base 42: mod_base = OTHER; note = 2'-O-methyl modified nucleotide
  modified_base 43: mod_base = OTHER; note = 2'-O-methyl modified nucleotide
  modified_base 47: mod_base = OTHER; note = 2'-O-methyl modified nucleotide
  modified_base 48: mod_base = OTHER; note = 2'-O-methyl modified nucleotide
  modified_base 51: mod_base = OTHER; note = 2'-O-methyl modified nucleotide
  modified_base 54: mod_base = OTHER; note = Nucleotide with phosphorothioate linkage
  modified_base 58: mod_base = OTHER; note = 2'-O-methyl modified nucleotide
  modified_base 59: mod_base = OTHER; note = 2'-O-methyl modified nucleotide
  modified_base 61: mod_base = OTHER; note = 2'-O-methyl modified nucleotide
  modified_base 62: mod_base = OTHER; note = 2'-O-methyl modified nucleotide
  modified_base 63: mod_base = OTHER; note = 2'-O-methyl modified nucleotide
  modified_base 64: mod_base = OTHER; note = 2'-O-methyl modified nucleotide
  modified_base 65: mod_base = OTHER; note = 2'-O-methyl modified nucleotide
  modified_base 66: mod_base = OTHER; note = 2'-O-methyl modified nucleotide
  modified_base 67: mod_base = OTHER; note = 2'-O-methyl modified nucleotide
  modified_base 68: mod_base = OTHER; note = 2'-O-methyl modified nucleotide
  modified_base 69: mod_base = OTHER; note = 2'-O-methyl modified nucleotide
  modified_base 70: mod_base = OTHER; note = 2'-O-methyl modified nucleotide
  modified_base 75: mod_base = OTHER; note = 2'-O-methyl modified nucleotide
  modified_base 77: mod_base = OTHER; note = 2'-O-methyl modified nucleotide
  modified_base 80: mod_base = OTHER; note = 2'-O-methyl modified nucleotide
  modified_base 86: mod_base = OTHER; note = 2'-O-methyl modified nucleotide
  modified_base 87: mod_base = OTHER; note = 2'-O-methyl modified nucleotide
  modified_base 89: mod_base = OTHER; note = 2'-O-methyl modified nucleotide
  modified_base 90: mod_base = OTHER; note = 2'-O-methyl modified nucleotide
  modified_base 91: mod_base = OTHER; note = 2'-O-methyl modified nucleotide
  modified_base 92: mod_base = OTHER; note = 2'-O-methyl modified nucleotide
  modified_base 99: mod_base = OTHER; note = Nucleotide with phosphorothioate linkage
  modified_base 100: mod_base = OTHER; note = 2'-O-methyl modified nucleotide with phosphorothioate linkage
  modified_base 101: mod_base = OTHER; note = 2'-O-methyl modified nucleotide

SEQ ID NO: 373 - RNA, 101 nt, synthetic construct; identical to SEQ ID NO: 371
  source 1..101: mol_type = other RNA
  modified_base 1: mod_base = OTHER; note = 2'-O-methyl modified nucleotide with phosphorothioate linkage
  modified_base 2: mod_base = OTHER; note = 2'-O-methyl modified nucleotide with phosphorothioate linkage
  modified_base 3: mod_base = OTHER; note = 2'-O-methyl modified nucleotide with phosphorothioate linkage
  modified_base 4: mod_base = OTHER; note = 2'-O-methyl modified nucleotide
  modified_base 5: mod_base = OTHER; note = 2'-O-methyl modified nucleotide
  modified_base 8: mod_base = OTHER; note = 2'-O-methyl modified nucleotide
  modified_base 9: mod_base = OTHER; note = 2'-O-methyl modified nucleotide
  modified_base 11: mod_base = OTHER; note = 2'-O-methyl modified nucleotide
  modified_base 13: mod_base = OTHER; note = 2'-O-methyl modified nucleotide
  modified_base 18: mod_base = OTHER; note = 2'-O-methyl modified nucleotide
  modified_base 22: mod_base = OTHER; note = 2'-O-methyl modified nucleotide
  modified_base 25: mod_base = OTHER; note = 2'-O-methyl modified nucleotide
  modified_base 29: mod_base = OTHER; note = 2'-O-methyl modified nucleotide
  modified_base 30: mod_base = OTHER; note = 2'-O-methyl modified nucleotide
  modified_base 31: mod_base = OTHER; note = 2'-O-methyl modified nucleotide
  modified_base 32: mod_base = OTHER; note = 2'-O-methyl modified nucleotide
  modified_base 37: mod_base = OTHER; note = 2'-O-methyl modified nucleotide
  modified_base 38: mod_base = OTHER; note = 2'-O-methyl modified nucleotide
  modified_base 39: mod_base = OTHER; note = 2'-O-methyl modified nucleotide
  modified_base 40: mod_base = OTHER; note = 2'-O-methyl modified nucleotide
  modified_base 41: mod_base = OTHER; note = 2'-O-methyl modified nucleotide
  modified_base 42: mod_base = OTHER; note = 2'-O-methyl modified nucleotide
  modified_base 43: mod_base = OTHER; note = 2'-O-methyl modified nucleotide
  modified_base 47: mod_base = OTHER; note = 2'-O-methyl modified nucleotide
  modified_base 48: mod_base = OTHER; note = 2'-O-methyl modified nucleotide
  modified_base 51: mod_base = OTHER; note = 2'-O-methyl modified nucleotide
  modified_base 58: mod_base = OTHER; note = 2'-O-methyl modified nucleotide
  modified_base 59: mod_base = OTHER; note = 2'-O-methyl modified nucleotide
  modified_base 61: mod_base = OTHER; note = 2'-O-methyl modified nucleotide
  modified_base 62: mod_base = OTHER; note = 2'-O-methyl modified nucleotide
  modified_base 63: mod_base = OTHER; note = 2'-O-methyl modified nucleotide
  modified_base 64: mod_base = OTHER; note = 2'-O-methyl modified nucleotide
  modified_base 65: mod_base = OTHER; note = 2'-O-methyl modified nucleotide
  modified_base 66: mod_base = OTHER; note = 2'-O-methyl modified nucleotide
  modified_base 67: mod_base = OTHER; note = 2'-O-methyl modified nucleotide
  modified_base 68: mod_base = OTHER; note = 2'-O-methyl modified nucleotide
  modified_base 69: mod_base = OTHER; note = 2'-O-methyl modified nucleotide
  modified_base 70: mod_base = OTHER; note = 2'-O-methyl modified nucleotide
  modified_base 75: mod_base = OTHER; note = 2'-O-methyl modified nucleotide
  modified_base 77: mod_base = OTHER; note = 2'-O-methyl modified nucleotide
  modified_base 80: mod_base = OTHER; note = 2'-O-methyl modified nucleotide
  modified_base 86: mod_base = OTHER; note = 2'-O-methyl modified nucleotide
  modified_base 87: mod_base = OTHER; note = 2'-O-methyl modified nucleotide
  modified_base 89: mod_base = OTHER; note = 2'-O-methyl modified nucleotide
  modified_base 90: mod_base = OTHER; note = 2'-O-methyl modified nucleotide
  modified_base 91: mod_base = OTHER; note = 2'-O-methyl modified nucleotide
  modified_base 92: mod_base = OTHER; note = 2'-O-methyl modified nucleotide
  modified_base 99: mod_base = OTHER; note = Nucleotide with phosphorothioate linkage
  modified_base 100: mod_base = OTHER; note = 2'-O-methyl modified nucleotide with phosphorothioate linkage
  modified_base 101: mod_base = OTHER; note = 2'-O-methyl modified nucleotide

SEQ ID NO: 374 - RNA, 24 nt, synthetic construct
  source 1..24: mol_type = other RNA
aaaacctgtcagtgattgggttcc

SEQ ID NO: 375 - RNA, 101 nt, synthetic construct
  source 1..101: mol_type = other RNA
aaaacctgtcagtgattgggttccgttgtagctccctgaaaccgttgctacaataaggccgtcgaaagatgtgccgcaacgctctgccttctggcatcgtt

SEQ ID NO: 376 - RNA, 101 nt, synthetic construct; identical to SEQ ID NO: 375
  source 1..101: mol_type = other RNA
  modified_base 1: mod_base = OTHER; note = 2'-O-methyl modified nucleotide with phosphorothioate linkage
  modified_base 2: mod_base = OTHER; note = 2'-O-methyl modified nucleotide with phosphorothioate linkage
  modified_base 3: mod_base = OTHER; note = 2'-O-methyl modified nucleotide with phosphorothioate linkage
  modified_base 4: mod_base = OTHER; note = 2'-O-methyl modified nucleotide
  modified_base 5: mod_base = OTHER; note = 2'-O-methyl modified nucleotide
  modified_base 8: mod_base = OTHER; note = 2'-O-methyl modified nucleotide
  modified_base 9: mod_base = OTHER; note = 2'-O-methyl modified nucleotide
  modified_base 11: mod_base = OTHER; note = 2'-O-methyl modified nucleotide
  modified_base 13: mod_base = OTHER; note = 2'-O-methyl modified nucleotide
  modified_base 18: mod_base = OTHER; note = 2'-O-methyl modified nucleotide
  modified_base 22: mod_base = OTHER; note = 2'-O-methyl modified nucleotide
  modified_base 25: mod_base = OTHER; note = 2'-O-methyl modified nucleotide
  modified_base 29: mod_base = OTHER; note = 2'-O-methyl modified nucleotide
  modified_base 30: mod_base = OTHER; note = 2'-O-methyl modified nucleotide
  modified_base 31: mod_base = OTHER; note = 2'-O-methyl modified nucleotide
  modified_base 32: mod_base = OTHER; note = 2'-O-methyl modified nucleotide
  modified_base 37: mod_base = OTHER; note = 2'-O-methyl modified nucleotide
  modified_base 38: mod_base = OTHER; note = 2'-O-methyl modified nucleotide
  modified_base 39: mod_base = OTHER; note = 2'-O-methyl modified nucleotide
  modified_base 40: mod_base = OTHER; note = 2'-O-methyl modified nucleotide
  modified_base 41: mod_base = OTHER; note = 2'-O-methyl modified nucleotide
  modified_base 42: mod_base = OTHER; note = 2'-O-methyl modified nucleotide
  modified_base 43: mod_base = OTHER; note = 2'-O-methyl modified nucleotide
  modified_base 47: mod_base = OTHER; note = 2'-O-methyl modified nucleotide
  modified_base 48: mod_base = OTHER; note = 2'-O-methyl modified nucleotide
  modified_base 51: mod_base = OTHER; note = 2'-O-methyl modified nucleotide
  modified_base 54: mod_base = OTHER; note = Nucleotide with phosphorothioate linkage
  modified_base 58: mod_base = OTHER; note = 2'-O-methyl modified nucleotide
  modified_base 59: mod_base = OTHER; note = 2'-O-methyl modified nucleotide
  modified_base 61: mod_base = OTHER; note = 2'-O-methyl modified nucleotide
  modified_base 62: mod_base = OTHER; note = 2'-O-methyl modified nucleotide
  modified_base 63: mod_base = OTHER; note = 2'-O-methyl modified nucleotide
  modified_base 64: mod_base = OTHER; note = 2'-O-methyl modified nucleotide
  modified_base 65: mod_base = OTHER; note = 2'-O-methyl modified nucleotide
  modified_base 66: mod_base = OTHER; note = 2'-O-methyl modified nucleotide
  modified_base 67: mod_base = OTHER; note = 2'-O-methyl modified nucleotide
  modified_base 68: mod_base = OTHER; note = 2'-O-methyl modified nucleotide
  modified_base 69: mod_base = OTHER; note = 2'-O-methyl modified nucleotide
  modified_base 70: mod_base = OTHER; note = 2'-O-methyl modified nucleotide
  modified_base 75: mod_base = OTHER; note = 2'-O-methyl modified nucleotide
  modified_base 77: mod_base = OTHER; note = 2'-O-methyl modified nucleotide
  modified_base 80: mod_base = OTHER; note = 2'-O-methyl modified nucleotide
  modified_base 86: mod_base = OTHER; note = 2'-O-methyl modified nucleotide
  modified_base 87: mod_base = OTHER; note = 2'-O-methyl modified nucleotide
  modified_base 89: mod_base = OTHER; note = 2'-O-methyl modified nucleotide
  modified_base 90: mod_base = OTHER; note = 2'-O-methyl modified nucleotide
  modified_base 91: mod_base = OTHER; note = 2'-O-methyl modified nucleotide
  modified_base 92: mod_base = OTHER; note = 2'-O-methyl modified nucleotide
  modified_base 99: mod_base = OTHER; note = Nucleotide with phosphorothioate linkage
  modified_base 100: mod_base = OTHER; note = 2'-O-methyl modified nucleotide with phosphorothioate linkage
  modified_base 101: mod_base = OTHER; note = 2'-O-methyl modified nucleotide

SEQ ID NO: 377 - RNA, 101 nt, synthetic construct; identical to SEQ ID NO: 375
  source 1..101: mol_type = other RNA
  modified_base 1: mod_base = OTHER; note = 2'-O-methyl modified nucleotide with phosphorothioate linkage
  modified_base 2: mod_base = OTHER; note = 2'-O-methyl modified nucleotide with phosphorothioate linkage
  modified_base 3: mod_base = OTHER; note = 2'-O-methyl modified nucleotide with phosphorothioate linkage
  modified_base 4: mod_base = OTHER; note = 2'-O-methyl modified nucleotide
  modified_base 5: mod_base = OTHER; note = 2'-O-methyl modified nucleotide
  modified_base 8: mod_base = OTHER; note = 2'-O-methyl modified nucleotide
  modified_base 9: mod_base = OTHER; note = 2'-O-methyl modified nucleotide
  modified_base 11: mod_base = OTHER; note = 2'-O-methyl modified nucleotide
  modified_base 13: mod_base = OTHER; note = 2'-O-methyl modified nucleotide
  modified_base 18: mod_base = OTHER; note = 2'-O-methyl modified nucleotide
  modified_base 22: mod_base = OTHER; note = 2'-O-methyl modified nucleotide
  modified_base 25: mod_base = OTHER; note = 2'-O-methyl modified nucleotide
  modified_base 29: mod_base = OTHER; note = 2'-O-methyl modified nucleotide
  modified_base 30: mod_base = OTHER; note = 2'-O-methyl modified nucleotide
  modified_base 31: mod_base = OTHER; note = 2'-O-methyl modified nucleotide
  modified_base 32: mod_base = OTHER; note = 2'-O-methyl modified nucleotide
  modified_base 37: mod_base = OTHER; note = 2'-O-methyl modified nucleotide
  modified_base 38: mod_base = OTHER; note = 2'-O-methyl modified nucleotide
  modified_base 39: mod_base = OTHER; note = 2'-O-methyl modified nucleotide
  modified_base 40: mod_base = OTHER; note = 2'-O-methyl modified nucleotide
  modified_base 41: mod_base = OTHER; note = 2'-O-methyl modified nucleotide
  modified_base 42: mod_base = OTHER; note = 2'-O-methyl modified nucleotide
  modified_base 43: mod_base = OTHER; note = 2'-O-methyl modified nucleotide
  modified_base 47: mod_base = OTHER; note = 2'-O-methyl modified nucleotide
  modified_base 48: mod_base = OTHER; note = 2'-O-methyl modified nucleotide
  modified_base 51: mod_base = OTHER; note = 2'-O-methyl modified nucleotide
  modified_base 58: mod_base = OTHER; note = 2'-O-methyl modified nucleotide
  modified_base 59: mod_base = OTHER; note = 2'-O-methyl modified nucleotide
  modified_base 61: mod_base = OTHER; note = 2'-O-methyl modified nucleotide
  modified_base 62: mod_base = OTHER; note = 2'-O-methyl modified nucleotide
  modified_base 63: mod_base = OTHER; note = 2'-O-methyl modified nucleotide
  modified_base 64: mod_base = OTHER; note = 2'-O-methyl modified nucleotide
  modified_base 65: mod_base = OTHER; note = 2'-O-methyl modified nucleotide
  modified_base 66: mod_base = OTHER; note = 2'-O-methyl modified nucleotide
  modified_base 67: mod_base = OTHER; note = 2'-O-methyl modified nucleotide
  modified_base 68: mod_base = OTHER; note = 2'-O-methyl modified nucleotide
  modified_base 69: mod_base = OTHER; note = 2'-O-methyl modified nucleotide
  modified_base 70: mod_base = OTHER; note = 2'-O-methyl modified nucleotide
  modified_base 75: mod_base = OTHER; note = 2'-O-methyl modified nucleotide
  modified_base 77: mod_base = OTHER; note = 2'-O-methyl modified nucleotide
  modified_base 80: mod_base = OTHER; note = 2'-O-methyl modified nucleotide
  modified_base 86: mod_base = OTHER; note = 2'-O-methyl modified nucleotide
  modified_base 87: mod_base = OTHER; note = 2'-O-methyl modified nucleotide
  modified_base 89: mod_base = OTHER; note = 2'-O-methyl modified nucleotide
  modified_base 90: mod_base = OTHER; note = 2'-O-methyl modified nucleotide
  modified_base 91: mod_base = OTHER; note = 2'-O-methyl modified nucleotide
  modified_base 92: mod_base = OTHER; note = 2'-O-methyl modified nucleotide
  modified_base 99: mod_base = OTHER; note = Nucleotide with phosphorothioate linkage
  modified_base 100: mod_base = OTHER; note = 2'-O-methyl modified nucleotide with phosphorothioate linkage
  modified_base 101: mod_base = OTHER; note = 2'-O-methyl modified nucleotide

SEQ ID NO: 378 - RNA, 24 nt, synthetic construct
  source 1..24: mol_type = other RNA
ttaggttcgtatctgtaaaaccaa

SEQ ID NO: 379 - RNA, 101 nt, synthetic construct
  source 1..101: mol_type = other RNA
ttaggttcgtatctgtaaaaccaagttgtagctccctgaaaccgttgctacaataaggccgtcgaaagatgtgccgcaacgctctgccttctggcatcgtt

SEQ ID NO: 380 - RNA, 101 nt, synthetic construct; identical to SEQ ID NO: 379
  source 1..101: mol_type = other RNA
  modified_base 1: mod_base = OTHER; note = 2'-O-methyl modified nucleotide with phosphorothioate linkage
  modified_base 2: mod_base = OTHER; note = 2'-O-methyl modified nucleotide with phosphorothioate linkage
  modified_base 3: mod_base = OTHER; note = 2'-O-methyl modified nucleotide with phosphorothioate linkage
  modified_base 4: mod_base = OTHER; note = 2'-O-methyl modified nucleotide
  modified_base 5: mod_base = OTHER; note = 2'-O-methyl modified nucleotide
  modified_base 8: mod_base = OTHER; note = 2'-O-methyl modified nucleotide
  modified_base 9: mod_base = OTHER; note = 2'-O-methyl modified nucleotide
  modified_base 11: mod_base = OTHER; note = 2'-O-methyl modified nucleotide
  modified_base 13: mod_base = OTHER; note = 2'-O-methyl modified nucleotide
  modified_base 18: mod_base = OTHER; note = 2'-O-methyl modified nucleotide
  modified_base 22: mod_base = OTHER; note = 2'-O-methyl modified nucleotide
  modified_base 25: mod_base = OTHER; note = 2'-O-methyl modified nucleotide
  modified_base 29: mod_base = OTHER; note = 2'-O-methyl modified nucleotide
  modified_base 30: mod_base = OTHER; note = 2'-O-methyl modified nucleotide
  modified_base 31: mod_base = OTHER; note = 2'-O-methyl modified nucleotide
  modified_base 32: mod_base = OTHER; note = 2'-O-methyl modified nucleotide
  modified_base 37: mod_base = OTHER; note = 2'-O-methyl modified nucleotide
  modified_base 38: mod_base = OTHER; note = 2'-O-methyl modified nucleotide
  modified_base 39: mod_base = OTHER; note = 2'-O-methyl modified nucleotide
  modified_base 40: mod_base = OTHER; note = 2'-O-methyl modified nucleotide
  modified_base 41: mod_base = OTHER; note = 2'-O-methyl modified nucleotide
  modified_base 42: mod_base = OTHER; note = 2'-O-methyl modified nucleotide
  modified_base 43: mod_base = OTHER; note = 2'-O-methyl modified nucleotide
  modified_base 47: mod_base = OTHER; note = 2'-O-methyl modified nucleotide
  modified_base 48: mod_base = OTHER; note = 2'-O-methyl modified nucleotide
  modified_base 51: mod_base = OTHER; note = 2'-O-methyl modified nucleotide
  modified_base 54: mod_base = OTHER; note = Nucleotide with phosphorothioate linkage
  modified_base 58: mod_base = OTHER; note = 2'-O-methyl modified nucleotide
  modified_base 59: mod_base = OTHER; note = 2'-O-methyl modified nucleotide
  modified_base 61: mod_base = OTHER; note = 2'-O-methyl modified nucleotide
  modified_base 62: mod_base = OTHER; note = 2'-O-methyl modified nucleotide
  modified_base 63: mod_base = OTHER; note = 2'-O-methyl modified nucleotide
  modified_base 64: mod_base = OTHER; note = 2'-O-methyl modified nucleotide
  modified_base 65: mod_base = OTHER; note = 2'-O-methyl modified nucleotide
  modified_base 66: mod_base = OTHER; note = 2'-O-methyl modified nucleotide
  modified_base 67: mod_base = OTHER; note = 2'-O-methyl modified nucleotide
  modified_base 68: mod_base = OTHER; note = 2'-O-methyl modified nucleotide
  modified_base 69: mod_base = OTHER; note = 2'-O-methyl modified nucleotide
  modified_base 70: mod_base = OTHER; note = 2'-O-methyl modified nucleotide
  modified_base 75: mod_base = OTHER; note = 2'-O-methyl modified nucleotide
  modified_base 77: mod_base = OTHER; note = 2'-O-methyl modified nucleotide
  modified_base 80: mod_base = OTHER; note = 2'-O-methyl modified nucleotide
  modified_base 86: mod_base = OTHER; note = 2'-O-methyl modified nucleotide
  modified_base 87: mod_base = OTHER; note = 2'-O-methyl modified nucleotide
  modified_base 89: mod_base = OTHER; note = 2'-O-methyl modified nucleotide
  modified_base 90: mod_base = OTHER; note = 2'-O-methyl modified nucleotide
  modified_base 91: mod_base = OTHER; note = 2'-O-methyl modified nucleotide
  modified_base 92: mod_base = OTHER; note = 2'-O-methyl modified nucleotide
  modified_base 99: mod_base = OTHER; note = Nucleotide with phosphorothioate linkage
  modified_base 100: mod_base = OTHER; note = 2'-O-methyl modified nucleotide with phosphorothioate linkage
  modified_base 101: mod_base = OTHER; note = 2'-O-methyl modified nucleotide

SEQ ID NO: 381 - RNA, 101 nt, synthetic construct; identical to SEQ ID NO: 379
  source 1..101: mol_type = other RNA
  modified_base 1: mod_base = OTHER; note = 2'-O-methyl modified nucleotide with phosphorothioate linkage
  modified_base 2: mod_base = OTHER; note = 2'-O-methyl modified nucleotide with phosphorothioate linkage
  modified_base 3: mod_base = OTHER; note = 2'-O-methyl modified nucleotide with phosphorothioate linkage
  modified_base 4: mod_base = OTHER; note = 2'-O-methyl modified nucleotide
  modified_base 5: mod_base = OTHER; note = 2'-O-methyl modified nucleotide
  modified_base 8: mod_base = OTHER; note = 2'-O-methyl modified nucleotide
  modified_base 9: mod_base = OTHER; note = 2'-O-methyl modified nucleotide
  modified_base 11: mod_base = OTHER; note = 2'-O-methyl modified nucleotide
  modified_base 13: mod_base = OTHER; note = 2'-O-methyl modified nucleotide
  modified_base 18: mod_base = OTHER; note = 2'-O-methyl modified nucleotide
  modified_base 22: mod_base = OTHER; note = 2'-O-methyl modified nucleotide
  modified_base 25: mod_base = OTHER; note = 2'-O-methyl modified nucleotide
  modified_base 29: mod_base = OTHER; note = 2'-O-methyl modified nucleotide
  modified_base 30: mod_base = OTHER; note = 2'-O-methyl modified nucleotide
  modified_base 31: mod_base = OTHER; note = 2'-O-methyl modified nucleotide
  modified_base 32: mod_base = OTHER; note = 2'-O-methyl modified nucleotide
  modified_base 37: mod_base = OTHER; note = 2'-O-methyl modified nucleotide
  modified_base 38: mod_base = OTHER; note = 2'-O-methyl modified nucleotide
  modified_base 39: mod_base = OTHER; note = 2'-O-methyl modified nucleotide
  modified_base 40: mod_base = OTHER; note = 2'-O-methyl modified nucleotide
  modified_base 41: mod_base = OTHER; note = 2'-O-methyl modified nucleotide
  modified_base 42: mod_base = OTHER; note = 2'-O-methyl modified nucleotide
  modified_base 43: mod_base = OTHER; note = 2'-O-methyl modified nucleotide
  modified_base 47: mod_base = OTHER; note = 2'-O-methyl modified nucleotide
  modified_base 48: mod_base = OTHER; note = 2'-O-methyl modified nucleotide
  modified_base 51: mod_base = OTHER; note = 2'-O-methyl modified nucleotide
  modified_base 58: mod_base = OTHER; note = 2'-O-methyl modified nucleotide
  modified_base 59: mod_base = OTHER; note = 2'-O-methyl modified nucleotide
  modified_base 61: mod_base = OTHER; note = 2'-O-methyl modified nucleotide
  modified_base 62: mod_base = OTHER; note = 2'-O-methyl modified nucleotide
  modified_base 63: mod_base = OTHER; note = 2'-O-methyl modified nucleotide
  modified_base 64: mod_base = OTHER; note = 2'-O-methyl modified nucleotide
  modified_base 65: mod_base = OTHER; note = 2'-O-methyl modified nucleotide
  modified_base 66: mod_base = OTHER; note = 2'-O-methyl modified nucleotide
  modified_base 67: mod_base = OTHER; note = 2'-O-methyl modified nucleotide
  modified_base 68: mod_base = OTHER; note = 2'-O-methyl modified nucleotide
  modified_base 69: mod_base = OTHER; note = 2'-O-methyl modified nucleotide
  modified_base 70: mod_base = OTHER; note = 2'-O-methyl modified nucleotide
  modified_base 75: mod_base = OTHER; note = 2'-O-methyl modified nucleotide
  modified_base 77: mod_base = OTHER; note = 2'-O-methyl modified nucleotide
  modified_base 80: mod_base = OTHER; note = 2'-O-methyl modified nucleotide
  modified_base 86: mod_base = OTHER; note = 2'-O-methyl modified nucleotide
  modified_base 87: mod_base = OTHER; note = 2'-O-methyl modified nucleotide
  modified_base 89: mod_base = OTHER; note = 2'-O-methyl modified nucleotide
  modified_base 90: mod_base = OTHER; note = 2'-O-methyl modified nucleotide
  modified_base 91: mod_base = OTHER; note = 2'-O-methyl modified nucleotide
  modified_base 92: mod_base = OTHER; note = 2'-O-methyl modified nucleotide
  modified_base 99: mod_base = OTHER; note = Nucleotide with phosphorothioate linkage
  modified_base 100: mod_base = OTHER; note = 2'-O-methyl modified nucleotide with phosphorothioate linkage
  modified_base 101: mod_base = OTHER; note = 2'-O-methyl modified nucleotide

SEQ ID NO: 382 - RNA, 101 nt, synthetic construct; identical to SEQ ID NO: 364
  source 1..101: mol_type = other RNA
  modified_base 1: mod_base = OTHER; note = 2'-O-methyl modified nucleotide with phosphorothioate linkage
  modified_base 2: mod_base = OTHER; note = 2'-O-methyl modified nucleotide with phosphorothioate linkage
  modified_base 3: mod_base = OTHER; note = 2'-O-methyl modified nucleotide with phosphorothioate linkage
  modified_base 4: mod_base = OTHER; note = 2'-O-methyl modified nucleotide
  modified_base 5: mod_base = OTHER; note = 2'-O-methyl modified nucleotide
  modified_base 8: mod_base = OTHER; note = 2'-O-methyl modified nucleotide
  modified_base 9: mod_base = OTHER; note = 2'-O-methyl modified nucleotide
  modified_base 11: mod_base = OTHER; note = 2'-O-methyl modified nucleotide
  modified_base 13: mod_base = OTHER; note = 2'-O-methyl modified nucleotide
  modified_base 18: mod_base = OTHER; note = 2'-O-methyl modified nucleotide
  modified_base 22: mod_base = OTHER; note = 2'-O-methyl modified nucleotide
  modified_base 25: mod_base = OTHER; note = 2'-O-methyl modified nucleotide
  modified_base 29: mod_base = OTHER; note = 2'-O-methyl modified nucleotide
  modified_base 30: mod_base = OTHER; note = 2'-O-methyl modified nucleotide
  modified_base 31: mod_base = OTHER; note = 2'-O-methyl modified nucleotide
  modified_base 32: mod_base = OTHER; note = 2'-O-methyl modified nucleotide
  modified_base 37: mod_base = OTHER; note = 2'-O-methyl modified nucleotide
  modified_base 38: mod_base = OTHER; note = 2'-O-methyl modified nucleotide
  modified_base 39: mod_base = OTHER; note = 2'-O-methyl modified nucleotide
  modified_base 40: mod_base = OTHER; note = 2'-O-methyl modified nucleotide
  modified_base 41: mod_base = OTHER; note = 2'-O-methyl modified nucleotide
  modified_base 42: mod_base = OTHER; note = 2'-O-methyl modified nucleotide
  modified_base 43: mod_base = OTHER; note = 2'-O-methyl modified nucleotide
  modified_base 47: mod_base = OTHER; note = 2'-O-methyl modified nucleotide
  modified_base 48: mod_base = OTHER; note = 2'-O-methyl modified nucleotide
  modified_base 51: mod_base = OTHER; note = 2'-O-methyl modified nucleotide
  modified_base 58: mod_base = OTHER; note = 2'-O-methyl modified nucleotide
  modified_base 59: mod_base = OTHER; note = 2'-O-methyl modified nucleotide
  modified_base 61: mod_base = OTHER; note = 2'-O-methyl modified nucleotide
  modified_base 62: mod_base = OTHER; note = 2'-O-methyl modified nucleotide
  modified_base 63: mod_base = OTHER; note = 2'-O-methyl modified nucleotide
  modified_base 64: mod_base = OTHER; note = 2'-O-methyl modified nucleotide
  modified_base 65: mod_base = OTHER; note = 2'-O-methyl modified nucleotide
  modified_base 66: mod_base = OTHER; note = 2'-O-methyl modified nucleotide
  modified_base 67: mod_base = OTHER; note = 2'-O-methyl modified nucleotide
  modified_base 68: mod_base = OTHER; note = 2'-O-methyl modified nucleotide
  modified_base 69: mod_base = OTHER; note = 2'-O-methyl modified nucleotide
  modified_base 70: mod_base = OTHER; note = 2'-O-methyl modified nucleotide
  modified_base 75: mod_base = OTHER; note = 2'-O-methyl modified nucleotide
  modified_base 77: mod_base = OTHER; note = 2'-O-methyl modified nucleotide
  modified_base 80: mod_base = OTHER; note = 2'-O-methyl modified nucleotide
  modified_base 86: mod_base = OTHER; note = 2'-O-methyl modified nucleotide
  modified_base 87: mod_base = OTHER; note = 2'-O-methyl modified nucleotide
  modified_base 89: mod_base = OTHER; note = 2'-O-methyl modified nucleotide
  modified_base 90: mod_base = OTHER; note = 2'-O-methyl modified nucleotide
  modified_base 91: mod_base = OTHER; note = 2'-O-methyl modified nucleotide
  modified_base 92: mod_base = OTHER; note = 2'-O-methyl modified nucleotide
  modified_base 99: mod_base = OTHER; note = Nucleotide with phosphorothioate linkage
  modified_base 100: mod_base = OTHER; note = 2'-O-methyl modified nucleotide with phosphorothioate linkage
  modified_base 101: mod_base = OTHER; note = 2'-O-methyl modified nucleotide

SEQ ID NO: 383 - RNA, 101 nt, synthetic construct; identical to SEQ ID NO: 346
  source 1..101: mol_type = other RNA
  modified_base 1: mod_base = OTHER; note = 2'-O-methyl modified nucleotide with phosphorothioate linkage
  modified_base 2: mod_base = OTHER; note = 2'-O-methyl modified nucleotide with phosphorothioate linkage
  modified_base 3: mod_base = OTHER; note = 2'-O-methyl modified nucleotide with phosphorothioate linkage
  modified_base 4: mod_base = OTHER; note = 2'-O-methyl modified nucleotide
  modified_base 5: mod_base = OTHER; note = 2'-O-methyl modified nucleotide
  modified_base 8: mod_base = OTHER; note = 2'-O-methyl modified nucleotide
  modified_base 9: mod_base = OTHER; note = 2'-O-methyl modified nucleotide
  modified_base 11: mod_base = OTHER; note = 2'-O-methyl modified nucleotide
  modified_base 13: mod_base = OTHER; note = 2'-O-methyl modified nucleotide
  modified_base 18: mod_base = OTHER; note = 2'-O-methyl modified nucleotide
  modified_base 22: mod_base = OTHER; note = 2'-O-methyl modified nucleotide
  modified_base 25: mod_base = OTHER; note = 2'-O-methyl modified nucleotide
  modified_base 29: mod_base = OTHER; note = 2'-O-methyl modified nucleotide
  modified_base 30: mod_base = OTHER; note = 2'-O-methyl modified nucleotide
  modified_base 31: mod_base = OTHER; note = 2'-O-methyl modified nucleotide
  modified_base 32: mod_base = OTHER; note = 2'-O-methyl modified nucleotide
  modified_base 37: mod_base = OTHER; note = 2'-O-methyl modified nucleotide
  modified_base 38: mod_base = OTHER; note = 2'-O-methyl modified nucleotide
  modified_base 39: mod_base = OTHER; note = 2'-O-methyl modified nucleotide
  modified_base 40: mod_base = OTHER; note = 2'-O-methyl modified nucleotide
  modified_base 41: mod_base = OTHER; note = 2'-O-methyl modified nucleotide
  modified_base 42: mod_base = OTHER; note = 2'-O-methyl modified nucleotide
  modified_base 43: mod_base = OTHER; note = 2'-O-methyl modified nucleotide
  modified_base 47: mod_base = OTHER; note = 2'-O-methyl modified nucleotide
  modified_base 48: mod_base = OTHER; note = 2'-O-methyl modified nucleotide
  modified_base 51: mod_base = OTHER; note = 2'-O-methyl modified nucleotide
  modified_base 58: mod_base = OTHER; note = 2'-O-methyl modified nucleotide
  modified_base 59: mod_base = OTHER; note = 2'-O-methyl modified nucleotide
  modified_base 61: mod_base = OTHER; note = 2'-O-methyl modified nucleotide
  modified_base 62: mod_base = OTHER; note = 2'-O-methyl modified nucleotide
  modified_base 63: mod_base = OTHER; note = 2'-O-methyl modified nucleotide
  modified_base 64: mod_base = OTHER; note = 2'-O-methyl modified nucleotide
  modified_base 65: mod_base = OTHER; note = 2'-O-methyl modified nucleotide
  modified_base 66: mod_base = OTHER; note = 2'-O-methyl modified nucleotide
  modified_base 67: mod_base = OTHER; note = 2'-O-methyl modified nucleotide
  modified_base 68: mod_base = OTHER; note = 2'-O-methyl modified nucleotide
  modified_base 69: mod_base = OTHER; note = 2'-O-methyl modified nucleotide
  modified_base 70: mod_base = OTHER; note = 2'-O-methyl modified nucleotide
  modified_base 75: mod_base = OTHER; note = 2'-O-methyl modified nucleotide
  modified_base 77: mod_base = OTHER; note = 2'-O-methyl modified nucleotide
  modified_base 80: mod_base = OTHER; note = 2'-O-methyl modified nucleotide
  modified_base 86: mod_base = OTHER; note = 2'-O-methyl modified nucleotide
  modified_base 87: mod_base = OTHER; note = 2'-O-methyl modified nucleotide
  modified_base 89: mod_base = OTHER; note = 2'-O-methyl modified nucleotide
  modified_base 90: mod_base = OTHER; note = 2'-O-methyl modified nucleotide
  modified_base 91: mod_base = OTHER; note = 2'-O-methyl modified nucleotide
  modified_base 92: mod_base = OTHER; note = 2'-O-methyl modified nucleotide
  modified_base 99: mod_base = OTHER; note = Nucleotide with phosphorothioate linkage
  modified_base 100: mod_base = OTHER; note = 2'-O-methyl modified nucleotide with phosphorothioate linkage
  modified_base 101: mod_base = OTHER; note = 2'-O-methyl modified nucleotide

SEQ ID NO: 384 - RNA, 24 nt, synthetic construct
  source 1..24: mol_type = other RNA
agctgccgttctgcccagtccggg

SEQ ID NO: 385 - RNA, 101 nt, synthetic construct
  source 1..101: mol_type = other RNA
agctgccgttctgcccagtccggggttgtagctccctgaaaccgttgctacaataaggccgtcgaaagatgtgccgcaacgctctgccttctggcatcgtt

SEQ ID NO: 386 - RNA, 101 nt, synthetic construct; identical to SEQ ID NO: 385
  source 1..101: mol_type = other RNA
  modified_base 1: mod_base = OTHER; note = 2'-O-methyl modified nucleotide with phosphorothioate linkage
  modified_base 2: mod_base = OTHER; note = 2'-O-methyl modified nucleotide with phosphorothioate linkage
  modified_base 3: mod_base = OTHER; note = 2'-O-methyl modified nucleotide with phosphorothioate linkage
  modified_base 4: mod_base = OTHER; note = 2'-O-methyl modified nucleotide
  modified_base 5: mod_base = OTHER; note = 2'-O-methyl modified nucleotide
  modified_base 8: mod_base = OTHER; note = 2'-O-methyl modified nucleotide
  modified_base 9: mod_base = OTHER; note = 2'-O-methyl modified nucleotide
  modified_base 11: mod_base = OTHER; note = 2'-O-methyl modified nucleotide
  modified_base 13: mod_base = OTHER; note = 2'-O-methyl modified nucleotide
  modified_base 18: mod_base = OTHER; note = 2'-O-methyl modified nucleotide
  modified_base 22: mod_base = OTHER; note = 2'-O-methyl modified nucleotide
  modified_base 25: mod_base = OTHER; note = 2'-O-methyl modified nucleotide
  modified_base 29: mod_base = OTHER; note = 2'-O-methyl modified nucleotide
  modified_base 30: mod_base = OTHER; note = 2'-O-methyl modified nucleotide
  modified_base 31: mod_base = OTHER; note = 2'-O-methyl modified nucleotide
  modified_base 32: mod_base = OTHER; note = 2'-O-methyl modified nucleotide
  modified_base 37: mod_base = OTHER; note = 2'-O-methyl modified nucleotide
  modified_base 38: mod_base = OTHER; note = 2'-O-methyl modified nucleotide
  modified_base 39: mod_base = OTHER; note = 2'-O-methyl modified nucleotide
  modified_base 40: mod_base = OTHER; note = 2'-O-methyl modified nucleotide
  modified_base 41: mod_base = OTHER; note = 2'-O-methyl modified nucleotide
  modified_base 42: mod_base = OTHER; note = 2'-O-methyl modified nucleotide
  modified_base 43: mod_base = OTHER; note = 2'-O-methyl modified nucleotide
  modified_base 47: mod_base = OTHER; note = 2'-O-methyl modified nucleotide
  modified_base 48: mod_base = OTHER; note = 2'-O-methyl modified nucleotide
  modified_base 51: mod_base = OTHER; note = 2'-O-methyl modified nucleotide
  modified_base 54: mod_base = OTHER; note = Nucleotide with phosphorothioate linkage
  modified_base 58: mod_base = OTHER; note = 2'-O-methyl modified nucleotide
  modified_base 59: mod_base = OTHER; note = 2'-O-methyl modified nucleotide
  modified_base 61: mod_base = OTHER; note = 2'-O-methyl modified nucleotide
  modified_base 62: mod_base = OTHER; note = 2'-O-methyl modified nucleotide
  modified_base 63: mod_base = OTHER; note = 2'-O-methyl modified nucleotide
  modified_base 64: mod_base = OTHER; note = 2'-O-methyl modified nucleotide
  modified_base 65: mod_base = OTHER; note = 2'-O-methyl modified nucleotide
  modified_base 66: mod_base = OTHER; note = 2'-O-methyl modified nucleotide
  modified_base 67: mod_base = OTHER; note = 2'-O-methyl modified nucleotide
  modified_base 68: mod_base = OTHER; note = 2'-O-methyl modified nucleotide
  modified_base 69: mod_base = OTHER; note = 2'-O-methyl modified nucleotide
  modified_base 70: mod_base = OTHER; note = 2'-O-methyl modified nucleotide
  modified_base 75: mod_base = OTHER; note = 2'-O-methyl modified nucleotide
  modified_base 77: mod_base = OTHER; note = 2'-O-methyl modified nucleotide
  modified_base 80: mod_base = OTHER; note = 2'-O-methyl modified nucleotide
  modified_base 86: mod_base = OTHER; note = 2'-O-methyl modified nucleotide
  modified_base 87: mod_base = OTHER; note = 2'-O-methyl modified nucleotide
  modified_base 89: mod_base = OTHER; note = 2'-O-methyl modified nucleotide
  modified_base 90: mod_base = OTHER; note = 2'-O-methyl modified nucleotide
  modified_base 91: mod_base = OTHER; note = 2'-O-methyl modified nucleotide
  modified_base 92: mod_base = OTHER; note = 2'-O-methyl modified nucleotide
  modified_base 99: mod_base = OTHER; note = Nucleotide with phosphorothioate linkage
  modified_base 100: mod_base = OTHER; note = 2'-O-methyl modified nucleotide with phosphorothioate linkage
  modified_base 101: mod_base = OTHER; note = 2'-O-methyl modified nucleotide

SEQ ID NO: 387 - RNA, 101 nt, synthetic construct; identical to SEQ ID NO: 385
  source 1..101: mol_type = other RNA
  modified_base 1: mod_base = OTHER; note = 2'-O-methyl modified nucleotide with phosphorothioate linkage
  modified_base 2: mod_base = OTHER; note = 2'-O-methyl modified nucleotide with phosphorothioate linkage
  modified_base 3: mod_base = OTHER; note = 2'-O-methyl modified nucleotide with phosphorothioate linkage
  modified_base 4: mod_base = OTHER; note = 2'-O-methyl modified nucleotide
  modified_base 5: mod_base = OTHER; note = 2'-O-methyl modified nucleotide
  modified_base 8: mod_base = OTHER; note = 2'-O-methyl modified nucleotide
  modified_base 9: mod_base = OTHER; note = 2'-O-methyl modified nucleotide
  modified_base 11: mod_base = OTHER; note = 2'-O-methyl modified nucleotide
  modified_base 13: mod_base = OTHER; note = 2'-O-methyl modified nucleotide
  modified_base 18: mod_base = OTHER; note = 2'-O-methyl modified nucleotide
  modified_base 22: mod_base = OTHER; note = 2'-O-methyl modified nucleotide
  modified_base 25: mod_base = OTHER; note = 2'-O-methyl modified nucleotide
  modified_base 29: mod_base = OTHER; note = 2'-O-methyl modified nucleotide
  modified_base 30: mod_base = OTHER; note = 2'-O-methyl modified nucleotide
  modified_base 31: mod_base = OTHER; note = 2'-O-methyl modified nucleotide
  modified_base 32: mod_base = OTHER; note = 2'-O-methyl modified nucleotide
  modified_base 37: mod_base = OTHER; note = 2'-O-methyl modified nucleotide
  modified_base 38: mod_base = OTHER; note = 2'-O-methyl modified nucleotide
  modified_base 39: mod_base = OTHER; note = 2'-O-methyl modified nucleotide
  modified_base 40: mod_base = OTHER; note = 2'-O-methyl modified nucleotide
  modified_base 41: mod_base = OTHER; note = 2'-O-methyl modified nucleotide
  modified_base 42: mod_base = OTHER; note = 2'-O-methyl modified nucleotide
  modified_base 43: mod_base = OTHER; note = 2'-O-methyl modified nucleotide
  modified_base 47: mod_base = OTHER; note = 2'-O-methyl modified nucleotide
  modified_base 48: mod_base = OTHER; note = 2'-O-methyl modified nucleotide
  modified_base 51: mod_base = OTHER; note = 2'-O-methyl modified nucleotide
  modified_base 58: mod_base = OTHER; note = 2'-O-methyl modified nucleotide
  modified_base 59: mod_base = OTHER; note = 2'-O-methyl modified nucleotide
  modified_base 61: mod_base = OTHER; note = 2'-O-methyl modified nucleotide
  modified_base 62: mod_base = OTHER; note = 2'-O-methyl modified nucleotide
  modified_base 63: mod_base = OTHER; note = 2'-O-methyl modified nucleotide
  modified_base 64: mod_base = OTHER; note = 2'-O-methyl modified nucleotide
  modified_base 65: mod_base = OTHER; note = 2'-O-methyl modified nucleotide
  modified_base 66: mod_base = OTHER; note = 2'-O-methyl modified nucleotide
  modified_base 67: mod_base = OTHER; note = 2'-O-methyl modified nucleotide
  modified_base 68: mod_base = OTHER; note = 2'-O-methyl modified nucleotide
  modified_base 69: mod_base = OTHER; note = 2'-O-methyl modified nucleotide
  modified_base 70: mod_base = OTHER; note = 2'-O-methyl modified nucleotide
  modified_base 75: mod_base = OTHER; note = 2'-O-methyl modified nucleotide
  modified_base 77: mod_base = OTHER; note = 2'-O-methyl modified nucleotide
  modified_base 80: mod_base = OTHER; note = 2'-O-methyl modified nucleotide
  modified_base 86: mod_base = OTHER; note = 2'-O-methyl modified nucleotide
  modified_base 87: mod_base = OTHER; note = 2'-O-methyl modified nucleotide
  modified_base 89: mod_base = OTHER; note = 2'-O-methyl modified nucleotide
  modified_base 90: mod_base = OTHER; note = 2'-O-methyl modified nucleotide
  modified_base 91: mod_base = OTHER; note = 2'-O-methyl modified nucleotide
  modified_base 92: mod_base = OTHER; note = 2'-O-methyl modified nucleotide
  modified_base 99: mod_base = OTHER; note = Nucleotide with phosphorothioate linkage
  modified_base 100: mod_base = OTHER; note = 2'-O-methyl modified nucleotide with phosphorothioate linkage
  modified_base 101: mod_base = OTHER; note = 2'-O-methyl modified nucleotide

SEQ ID NO: 388 - RNA, 24 nt, synthetic construct
  source 1..24: mol_type = other RNA
tctgggaaaggaggggaagatgag

SEQ ID NO: 389 - RNA, 101 nt, synthetic construct
  source 1..101: mol_type = other RNA
tctgggaaaggaggggaagatgaggttgtagctccctgaaaccgttgctacaataaggccgtcgaaagatgtgccgcaacgctctgccttctggcatcgtt

SEQ ID NO: 390 - RNA, 101 nt, synthetic construct; identical to SEQ ID NO: 389
  source 1..101: mol_type = other RNA
  modified_base 1: mod_base = OTHER; note = 2'-O-methyl modified nucleotide with phosphorothioate linkage
  modified_base 2: mod_base = OTHER; note = 2'-O-methyl modified nucleotide with phosphorothioate linkage
  modified_base 3: mod_base = OTHER; note = 2'-O-methyl modified nucleotide with phosphorothioate linkage
  modified_base 4: mod_base = OTHER; note = 2'-O-methyl modified nucleotide
  modified_base 5: mod_base = OTHER; note = 2'-O-methyl modified nucleotide
  modified_base 8: mod_base = OTHER; note = 2'-O-methyl modified nucleotide
  modified_base 9: mod_base = OTHER; note = 2'-O-methyl modified nucleotide
  modified_base 11: mod_base = OTHER; note = 2'-O-methyl modified nucleotide
  modified_base 13: mod_base = OTHER; note = 2'-O-methyl modified nucleotide
  modified_base 18: mod_base = OTHER; note = 2'-O-methyl modified nucleotide
  modified_base 22: mod_base = OTHER; note = 2'-O-methyl modified nucleotide
  modified_base 25: mod_base = OTHER; note = 2'-O-methyl modified nucleotide
  modified_base 29: mod_base = OTHER; note = 2'-O-methyl modified nucleotide
  modified_base 30: mod_base = OTHER; note = 2'-O-methyl modified nucleotide
  modified_base 31: mod_base = OTHER; note = 2'-O-methyl modified nucleotide
  modified_base 32: mod_base = OTHER; note = 2'-O-methyl modified nucleotide
  modified_base 37: mod_base = OTHER; note = 2'-O-methyl modified nucleotide
  modified_base 38: mod_base = OTHER; note = 2'-O-methyl modified nucleotide
  modified_base 39: mod_base = OTHER; note = 2'-O-methyl modified nucleotide
  modified_base 40: mod_base = OTHER; note = 2'-O-methyl modified nucleotide
  modified_base 41: mod_base = OTHER; note = 2'-O-methyl modified nucleotide
  modified_base 42: mod_base = OTHER; note = 2'-O-methyl modified nucleotide
  modified_base 43: mod_base = OTHER; note = 2'-O-methyl modified nucleotide
  modified_base 47: mod_base = OTHER; note = 2'-O-methyl modified nucleotide
  modified_base 48: mod_base = OTHER; note = 2'-O-methyl modified nucleotide
  modified_base 51: mod_base = OTHER; note = 2'-O-methyl modified nucleotide
  modified_base 54: mod_base = OTHER; note = Nucleotide with phosphorothioate linkage
  modified_base 58: mod_base = OTHER; note = 2'-O-methyl modified nucleotide
  modified_base 59: mod_base = OTHER; note = 2'-O-methyl modified nucleotide
  modified_base 61: mod_base = OTHER; note = 2'-O-methyl modified nucleotide
  modified_base 62: mod_base = OTHER; note = 2'-O-methyl modified nucleotide
  modified_base 63: mod_base = OTHER; note = 2'-O-methyl modified nucleotide
  modified_base 64: mod_base = OTHER; note = 2'-O-methyl modified nucleotide
  modified_base 65: mod_base = OTHER; note = 2'-O-methyl modified nucleotide
  modified_base 66: mod_base = OTHER; note = 2'-O-methyl modified nucleotide
  modified_base 67: mod_base = OTHER; note = 2'-O-methyl modified nucleotide
  modified_base 68: mod_base = OTHER; note = 2'-O-methyl modified nucleotide
  modified_base 69: mod_base = OTHER; note = 2'-O-methyl modified nucleotide
  modified_base 70: mod_base = OTHER; note = 2'-O-methyl modified nucleotide
  modified_base 75: mod_base = OTHER; note = 2'-O-methyl modified nucleotide
  modified_base 77: mod_base = OTHER; note = 2'-O-methyl modified nucleotide
  modified_base 80: mod_base = OTHER; note = 2'-O-methyl modified nucleotide
  modified_base 86: mod_base = OTHER; note = 2'-O-methyl modified nucleotide
  modified_base 87: mod_base = OTHER; note = 2'-O-methyl modified nucleotide
  modified_base 89: mod_base = OTHER; note = 2'-O-methyl modified nucleotide
  modified_base 90: mod_base = OTHER; note = 2'-O-methyl modified nucleotide
  modified_base 91: mod_base = OTHER; note = 2'-O-methyl modified nucleotide
  modified_base 92: mod_base = OTHER; note = 2'-O-methyl modified nucleotide
  modified_base 99: mod_base = OTHER; note = Nucleotide with phosphorothioate linkage
  modified_base 100: mod_base = OTHER; note = 2'-O-methyl modified nucleotide with phosphorothioate linkage
  modified_base 101: mod_base = OTHER; note = 2'-O-methyl modified nucleotide

SEQ ID NO: 391 - RNA, 101 nt, synthetic construct; identical to SEQ ID NO: 389
  source 1..101: mol_type = other RNA
  modified_base 1: mod_base = OTHER; note = 2'-O-methyl modified nucleotide with phosphorothioate linkage
  modified_base 2: mod_base = OTHER; note = 2'-O-methyl modified nucleotide with phosphorothioate linkage
  modified_base 3: mod_base = OTHER; note = 2'-O-methyl modified nucleotide with phosphorothioate linkage
  modified_base 4: mod_base = OTHER; note = 2'-O-methyl modified nucleotide
  modified_base 5: mod_base = OTHER; note = 2'-O-methyl modified nucleotide
  modified_base 8: mod_base = OTHER; note = 2'-O-methyl modified nucleotide
  modified_base 9: mod_base = OTHER; note = 2'-O-methyl modified nucleotide
  modified_base 11: mod_base = OTHER; note = 2'-O-methyl modified nucleotide
  modified_base 13: mod_base = OTHER; note = 2'-O-methyl modified nucleotide
  modified_base 18: mod_base = OTHER; note = 2'-O-methyl modified nucleotide
  modified_base 22: mod_base = OTHER; note = 2'-O-methyl modified nucleotide
  modified_base 25: mod_base = OTHER; note = 2'-O-methyl modified nucleotide
  modified_base 29: mod_base = OTHER; note = 2'-O-methyl modified nucleotide
  modified_base 30: mod_base = OTHER; note = 2'-O-methyl modified nucleotide
  modified_base 31: mod_base = OTHER; note = 2'-O-methyl modified nucleotide
  modified_base 32: mod_base = OTHER; note = 2'-O-methyl modified nucleotide
  modified_base 37: mod_base = OTHER; note = 2'-O-methyl modified nucleotide
  modified_base 38: mod_base = OTHER; note = 2'-O-methyl modified nucleotide
  modified_base 39: mod_base = OTHER; note = 2'-O-methyl modified nucleotide
  modified_base 40: mod_base = OTHER; note = 2'-O-methyl modified nucleotide
  modified_base 41: mod_base = OTHER; note = 2'-O-methyl modified nucleotide
  modified_base 42: mod_base = OTHER; note = 2'-O-methyl modified nucleotide
  modified_base 43: mod_base = OTHER; note = 2'-O-methyl modified nucleotide
  modified_base 47: mod_base = OTHER; note = 2'-O-methyl modified nucleotide
  modified_base 48: mod_base = OTHER; note = 2'-O-methyl modified nucleotide
  modified_base 51: mod_base = OTHER; note = 2'-O-methyl modified nucleotide
  modified_base 58: mod_base = OTHER; note = 2'-O-methyl modified nucleotide
  modified_base 59: mod_base = OTHER; note = 2'-O-methyl modified nucleotide
  modified_base 61: mod_base = OTHER; note = 2'-O-methyl modified nucleotide
  modified_base 62: mod_base = OTHER; note = 2'-O-methyl modified nucleotide
  modified_base 63: mod_base = OTHER; note = 2'-O-methyl modified nucleotide
  modified_base 64: mod_base = OTHER; note = 2'-O-methyl modified nucleotide
  modified_base 65: mod_base = OTHER; note = 2'-O-methyl modified nucleotide
  modified_base 66: mod_base = OTHER; note = 2'-O-methyl modified nucleotide
  modified_base 67: mod_base = OTHER; note = 2'-O-methyl modified nucleotide
  modified_base 68: mod_base = OTHER; note = 2'-O-methyl modified nucleotide
  modified_base 69: mod_base = OTHER; note = 2'-O-methyl modified nucleotide
  modified_base 70: mod_base = OTHER; note = 2'-O-methyl modified nucleotide
  modified_base 75: mod_base = OTHER; note = 2'-O-methyl modified nucleotide
  modified_base 77: mod_base = OTHER; note = 2'-O-methyl modified nucleotide
  modified_base 80: mod_base = OTHER; note = 2'-O-methyl modified nucleotide
  modified_base 86: mod_base = OTHER; note = 2'-O-methyl modified nucleotide
  modified_base 87: mod_base = OTHER; note = 2'-O-methyl modified nucleotide
  modified_base 89: mod_base = OTHER; note = 2'-O-methyl modified nucleotide
  modified_base 90: mod_base = OTHER; note = 2'-O-methyl modified nucleotide
  modified_base 91: mod_base = OTHER; note = 2'-O-methyl modified nucleotide
  modified_base 92: mod_base = OTHER; note = 2'-O-methyl modified nucleotide
  modified_base 99: mod_base = OTHER; note = Nucleotide with phosphorothioate linkage
  modified_base 100: mod_base = OTHER; note = 2'-O-methyl modified nucleotide with phosphorothioate linkage
  modified_base 101: mod_base = OTHER; note = 2'-O-methyl modified nucleotide

SEQ ID NO: 392 - RNA, 24 nt, synthetic construct
  source 1..24: mol_type = other RNA
ctctgggaaaggaggggaagatga

SEQ ID NO: 393 - RNA, 101 nt, synthetic construct
  source 1..101: mol_type = other RNA
ctctgggaaaggaggggaagatgagttgtagctccctgaaaccgttgctacaataaggccgtcgaaagatgtgccgcaacgctctgccttctggcatcgtt

SEQ ID NO: 394 - RNA, 101 nt, synthetic construct; identical to SEQ ID NO: 393
  source 1..101: mol_type = other RNA
  modified_base 1: mod_base = OTHER; note = 2'-O-methyl modified nucleotide with phosphorothioate linkage
  modified_base 2: mod_base = OTHER; note = 2'-O-methyl modified nucleotide with phosphorothioate linkage
  modified_base 3: mod_base = OTHER; note = 2'-O-methyl modified nucleotide with phosphorothioate linkage
  modified_base 4: mod_base = OTHER; note = 2'-O-methyl modified nucleotide
  modified_base 5: mod_base = OTHER; note = 2'-O-methyl modified nucleotide
  modified_base 8: mod_base = OTHER; note = 2'-O-methyl modified nucleotide
  modified_base 9: mod_base = OTHER; note = 2'-O-methyl modified nucleotide
  modified_base 11: mod_base = OTHER; note = 2'-O-methyl modified nucleotide
  modified_base 13: mod_base = OTHER; note = 2'-O-methyl modified nucleotide
  modified_base 18: mod_base = OTHER; note = 2'-O-methyl modified nucleotide
  modified_base 22: mod_base = OTHER; note = 2'-O-methyl modified nucleotide
  modified_base 25: mod_base = OTHER; note = 2'-O-methyl modified nucleotide
  modified_base 29: mod_base = OTHER; note = 2'-O-methyl modified nucleotide
  modified_base 30: mod_base = OTHER; note = 2'-O-methyl modified nucleotide
  modified_base 31: mod_base = OTHER; note = 2'-O-methyl modified nucleotide
  modified_base 32: mod_base = OTHER; note = 2'-O-methyl modified nucleotide
  modified_base 37: mod_base = OTHER; note = 2'-O-methyl modified nucleotide
  modified_base 38: mod_base = OTHER; note = 2'-O-methyl modified nucleotide
  modified_base 39: mod_base = OTHER; note = 2'-O-methyl modified nucleotide
  modified_base 40: mod_base = OTHER; note = 2'-O-methyl modified nucleotide
  modified_base 41: mod_base = OTHER; note = 2'-O-methyl modified nucleotide
  modified_base 42: mod_base = OTHER; note = 2'-O-methyl modified nucleotide
  modified_base 43: mod_base = OTHER; note = 2'-O-methyl modified nucleotide
  modified_base 47: mod_base = OTHER; note = 2'-O-methyl modified nucleotide
  modified_base 48: mod_base = OTHER; note = 2'-O-methyl modified nucleotide
  modified_base 51: mod_base = OTHER; note = 2'-O-methyl modified nucleotide
  modified_base 54: mod_base = OTHER; note = Nucleotide with phosphorothioate linkage
  modified_base 58: mod_base = OTHER; note = 2'-O-methyl modified nucleotide
  modified_base 59: mod_base = OTHER; note = 2'-O-methyl modified nucleotide
  modified_base 61: mod_base = OTHER; note = 2'-O-methyl modified nucleotide
  modified_base 62: mod_base = OTHER; note = 2'-O-methyl modified nucleotide
  modified_base 63: mod_base = OTHER; note = 2'-O-methyl modified nucleotide
  modified_base 64: mod_base = OTHER; note = 2'-O-methyl modified nucleotide
  modified_base 65: mod_base = OTHER; note = 2'-O-methyl modified nucleotide
  modified_base 66: mod_base = OTHER; note = 2'-O-methyl modified nucleotide
  modified_base 67: mod_base = OTHER; note = 2'-O-methyl modified nucleotide
  modified_base 68: mod_base = OTHER; note = 2'-O-methyl modified nucleotide
  modified_base 69: mod_base = OTHER; note = 2'-O-methyl modified nucleotide
  modified_base 70: mod_base = OTHER; note = 2'-O-methyl modified nucleotide
  modified_base 75: mod_base = OTHER; note = 2'-O-methyl modified nucleotide
  modified_base 77: mod_base = OTHER; note = 2'-O-methyl modified nucleotide
  modified_base 80: mod_base = OTHER; note = 2'-O-methyl modified nucleotide
  modified_base 86: mod_base = OTHER; note = 2'-O-methyl modified nucleotide
  modified_base 87: mod_base = OTHER; note = 2'-O-methyl modified nucleotide
  modified_base 89: mod_base = OTHER; note = 2'-O-methyl modified nucleotide
  modified_base 90: mod_base = OTHER; note = 2'-O-methyl modified nucleotide
  modified_base 91: mod_base = OTHER; note = 2'-O-methyl modified nucleotide
  modified_base 92: mod_base = OTHER; note = 2'-O-methyl modified nucleotide
  modified_base 99: mod_base = OTHER; note = Nucleotide with phosphorothioate linkage
  modified_base 100: mod_base = OTHER; note = 2'-O-methyl modified nucleotide with phosphorothioate linkage
  modified_base 101: mod_base = OTHER; note = 2'-O-methyl modified nucleotide

SEQ ID NO: 395 - RNA, 101 nt, synthetic construct; identical to SEQ ID NO: 393
  source 1..101: mol_type = other RNA
  modified_base 1: mod_base = OTHER; note = 2'-O-methyl modified nucleotide with phosphorothioate linkage
  modified_base 2: mod_base = OTHER; note = 2'-O-methyl modified nucleotide with phosphorothioate linkage
  modified_base 3: mod_base = OTHER; note = 2'-O-methyl modified nucleotide with phosphorothioate linkage
  modified_base 4: mod_base = OTHER; note = 2'-O-methyl modified nucleotide
  modified_base 5: mod_base = OTHER; note = 2'-O-methyl modified nucleotide
  modified_base 8: mod_base = OTHER; note = 2'-O-methyl modified nucleotide
  modified_base 9: mod_base = OTHER; note = 2'-O-methyl modified nucleotide
  modified_base 11: mod_base = OTHER; note = 2'-O-methyl modified nucleotide
  modified_base 13: mod_base = OTHER; note = 2'-O-methyl modified nucleotide
  modified_base 18: mod_base = OTHER; note = 2'-O-methyl modified nucleotide
  modified_base 22: mod_base = OTHER; note = 2'-O-methyl modified nucleotide
  modified_base 25: mod_base = OTHER; note = 2'-O-methyl modified nucleotide
  modified_base 29: mod_base = OTHER; note = 2'-O-methyl modified nucleotide
  modified_base 30: mod_base = OTHER; note = 2'-O-methyl modified nucleotide
  modified_base 31: mod_base = OTHER; note = 2'-O-methyl modified nucleotide
  modified_base 32: mod_base = OTHER; note = 2'-O-methyl modified nucleotide
  modified_base 37: mod_base = OTHER; note = 2'-O-methyl modified nucleotide
  modified_base 38: mod_base = OTHER; note = 2'-O-methyl modified nucleotide
  modified_base 39: mod_base = OTHER; note = 2'-O-methyl modified nucleotide
  modified_base 40: mod_base = OTHER; note = 2'-O-methyl modified nucleotide
  modified_base 41: mod_base = OTHER; note = 2'-O-methyl modified nucleotide
  modified_base 42: mod_base = OTHER; note = 2'-O-methyl modified nucleotide
  modified_base 43: mod_base = OTHER; note = 2'-O-methyl modified nucleotide
  modified_base 47: mod_base = OTHER; note = 2'-O-methyl modified nucleotide
  modified_base 48: mod_base = OTHER; note = 2'-O-methyl modified nucleotide
  modified_base 51: mod_base = OTHER; note = 2'-O-methyl modified nucleotide
  modified_base 58: mod_base = OTHER; note = 2'-O-methyl modified nucleotide
  modified_base 59: mod_base = OTHER; note = 2'-O-methyl modified nucleotide
  modified_base 61: mod_base = OTHER; note = 2'-O-methyl modified nucleotide
  modified_base 62: mod_base = OTHER; note = 2'-O-methyl modified nucleotide
  modified_base 63: mod_base = OTHER; note = 2'-O-methyl modified nucleotide
  modified_base 64: mod_base = OTHER; note = 2'-O-methyl modified nucleotide
  modified_base 65: mod_base = OTHER; note = 2'-O-methyl modified nucleotide
  modified_base 66: mod_base = OTHER; note = 2'-O-methyl modified nucleotide
  modified_base 67: mod_base = OTHER; note = 2'-O-methyl modified nucleotide
  modified_base 68: mod_base = OTHER; note = 2'-O-methyl modified nucleotide
  modified_base 69: mod_base = OTHER; note = 2'-O-methyl modified nucleotide
  modified_base 70: mod_base = OTHER; note = 2'-O-methyl modified nucleotide
  modified_base 75: mod_base = OTHER; note = 2'-O-methyl modified nucleotide
  modified_base 77: mod_base = OTHER; note = 2'-O-methyl modified nucleotide
  modified_base 80: mod_base = OTHER; note = 2'-O-methyl modified nucleotide
  modified_base 86: mod_base = OTHER; note = 2'-O-methyl modified nucleotide
  modified_base 87: mod_base = OTHER; note = 2'-O-methyl modified nucleotide
  modified_base 89: mod_base = OTHER; note = 2'-O-methyl modified nucleotide
  modified_base 90: mod_base = OTHER; note = 2'-O-methyl modified nucleotide
  modified_base 91: mod_base = OTHER; note = 2'-O-methyl modified nucleotide
  modified_base 92: mod_base = OTHER; note = 2'-O-methyl modified nucleotide
  modified_base 99: mod_base = OTHER; note = Nucleotide with phosphorothioate linkage
  modified_base 100: mod_base = OTHER; note = 2'-O-methyl modified nucleotide with phosphorothioate linkage
  modified_base 101: mod_base = OTHER; note = 2'-O-methyl modified nucleotide

SEQ ID NO: 396 - RNA, 24 nt, synthetic construct
  source 1..24: mol_type = other RNA
tcccagagccgtcttcccagtcca

SEQ ID NO: 397 - RNA, 101 nt, synthetic construct
  source 1..101: mol_type = other RNA
tcccagagccgtcttcccagtccagttgtagctccctgaaaccgttgctacaataaggccgtcgaaagatgtgccgcaacgctctgccttctggcatcgtt

SEQ ID NO: 398 - RNA, 101 nt, synthetic construct; identical to SEQ ID NO: 397
  source 1..101: mol_type = other RNA
  modified_base 1: mod_base = OTHER; note = 2'-O-methyl modified nucleotide with phosphorothioate linkage
  modified_base 2: mod_base = OTHER; note = 2'-O-methyl modified nucleotide with phosphorothioate linkage
  modified_base 3: mod_base = OTHER; note = 2'-O-methyl modified nucleotide with phosphorothioate linkage
  modified_base 4: mod_base = OTHER; note = 2'-O-methyl modified nucleotide
  modified_base 5: mod_base = OTHER; note = 2'-O-methyl modified nucleotide
  modified_base 8: mod_base = OTHER; note = 2'-O-methyl modified nucleotide
  modified_base 9: mod_base = OTHER; note = 2'-O-methyl modified nucleotide
  modified_base 11: mod_base = OTHER; note = 2'-O-methyl modified nucleotide
  modified_base 13: mod_base = OTHER; note = 2'-O-methyl modified nucleotide
  modified_base 18: mod_base = OTHER; note = 2'-O-methyl modified nucleotide
  modified_base 22: mod_base = OTHER; note = 2'-O-methyl modified nucleotide
  modified_base 25: mod_base = OTHER; note = 2'-O-methyl modified nucleotide
  modified_base 29: mod_base = OTHER; note = 2'-O-methyl modified nucleotide
  modified_base 30: mod_base = OTHER; note = 2'-O-methyl modified nucleotide
  modified_base 31: mod_base = OTHER; note = 2'-O-methyl modified nucleotide
  modified_base 32: mod_base = OTHER; note = 2'-O-methyl modified nucleotide
  modified_base 37: mod_base = OTHER; note = 2'-O-methyl modified nucleotide
  modified_base 38: mod_base = OTHER; note = 2'-O-methyl modified nucleotide
  modified_base 39: mod_base = OTHER; note = 2'-O-methyl modified nucleotide
  modified_base 40: mod_base = OTHER; note = 2'-O-methyl modified nucleotide
  modified_base 41: mod_base = OTHER; note = 2'-O-methyl modified nucleotide
  modified_base 42: mod_base = OTHER; note = 2'-O-methyl modified nucleotide
  modified_base 43: mod_base = OTHER; note = 2'-O-methyl modified nucleotide
  modified_base 47: mod_base = OTHER; note = 2'-O-methyl modified nucleotide
  modified_base 48: mod_base = OTHER; note = 2'-O-methyl modified nucleotide
  modified_base 51: mod_base = OTHER; note = 2'-O-methyl modified nucleotide
  modified_base 54: mod_base = OTHER; note = Nucleotide with phosphorothioate linkage
  modified_base 58: mod_base = OTHER; note = 2'-O-methyl modified nucleotide
  modified_base 59: mod_base = OTHER; note = 2'-O-methyl modified nucleotide
  modified_base 61: mod_base = OTHER; note = 2'-O-methyl modified nucleotide
  modified_base 62: mod_base = OTHER; note = 2'-O-methyl modified nucleotide
  modified_base 63: mod_base = OTHER; note = 2'-O-methyl modified nucleotide
  modified_base 64: mod_base = OTHER; note = 2'-O-methyl modified nucleotide
  modified_base 65: mod_base = OTHER; note = 2'-O-methyl modified nucleotide
  modified_base 66: mod_base = OTHER; note = 2'-O-methyl modified nucleotide
  modified_base 67: mod_base = OTHER; note = 2'-O-methyl modified nucleotide
  modified_base 68: mod_base = OTHER; note = 2'-O-methyl modified nucleotide
  modified_base 69: mod_base = OTHER; note = 2'-O-methyl modified nucleotide
  modified_base 70: mod_base = OTHER; note = 2'-O-methyl modified nucleotide
  modified_base 75: mod_base = OTHER; note = 2'-O-methyl modified nucleotide
  modified_base 77: mod_base = OTHER; note = 2'-O-methyl modified nucleotide
  modified_base 80: mod_base = OTHER; note = 2'-O-methyl modified nucleotide
  modified_base 86: mod_base = OTHER; note = 2'-O-methyl modified nucleotide
  modified_base 87: mod_base = OTHER; note = 2'-O-methyl modified nucleotide
  modified_base 89: mod_base = OTHER; note = 2'-O-methyl modified nucleotide
  modified_base 90: mod_base = OTHER; note = 2'-O-methyl modified nucleotide
  modified_base 91: mod_base = OTHER; note = 2'-O-methyl modified nucleotide
  modified_base 92: mod_base = OTHER; note = 2'-O-methyl modified nucleotide
  modified_base 99: mod_base = OTHER; note = Nucleotide with phosphorothioate linkage
  modified_base 100: mod_base = OTHER; note = 2'-O-methyl modified nucleotide with phosphorothioate linkage
  modified_base 101: mod_base = OTHER; note = 2'-O-methyl modified nucleotide

SEQ ID NO: 399 - RNA, 101 nt, synthetic construct; identical to SEQ ID NO: 397
  source 1..101: mol_type = other RNA
  modified_base 1: mod_base = OTHER; note = 2'-O-methyl modified nucleotide with phosphorothioate linkage
  modified_base 2: mod_base = OTHER; note = 2'-O-methyl modified nucleotide with phosphorothioate linkage
  modified_base 3: mod_base = OTHER; note = 2'-O-methyl modified nucleotide with phosphorothioate linkage
  modified_base 4: mod_base = OTHER; note = 2'-O-methyl modified nucleotide
  modified_base 5: mod_base = OTHER; note = 2'-O-methyl modified nucleotide
  modified_base 8: mod_base = OTHER; note = 2'-O-methyl modified nucleotide
  modified_base 9: mod_base = OTHER; note = 2'-O-methyl modified nucleotide
  modified_base 11: mod_base = OTHER; note = 2'-O-methyl modified nucleotide
  modified_base 13: mod_base = OTHER; note = 2'-O-methyl modified nucleotide
  modified_base 18: mod_base = OTHER; note = 2'-O-methyl modified nucleotide
  modified_base 22: mod_base = OTHER; note = 2'-O-methyl modified nucleotide
  modified_base 25: mod_base = OTHER; note = 2'-O-methyl modified nucleotide
  modified_base 29: mod_base = OTHER; note = 2'-O-methyl modified nucleotide
  modified_base 30: mod_base = OTHER; note = 2'-O-methyl modified nucleotide
  modified_base 31: mod_base = OTHER; note = 2'-O-methyl modified nucleotide
  modified_base 32: mod_base = OTHER; note = 2'-O-methyl modified nucleotide
  modified_base 37: mod_base = OTHER; note = 2'-O-methyl modified nucleotide
  modified_base 38: mod_base = OTHER; note = 2'-O-methyl modified nucleotide
  modified_base 39: mod_base = OTHER; note = 2'-O-methyl modified nucleotide
  modified_base 40: mod_base = OTHER; note = 2'-O-methyl modified nucleotide
  modified_base 41: mod_base = OTHER; note = 2'-O-methyl modified nucleotide
  modified_base 42: mod_base = OTHER; note = 2'-O-methyl modified nucleotide
  modified_base 43: mod_base = OTHER; note = 2'-O-methyl modified nucleotide
  modified_base 47: mod_base = OTHER; note = 2'-O-methyl modified nucleotide
  modified_base 48: mod_base = OTHER; note = 2'-O-methyl modified nucleotide
  modified_base 51: mod_base = OTHER; note = 2'-O-methyl modified nucleotide
  modified_base 58: mod_base = OTHER; note = 2'-O-methyl modified nucleotide
  modified_base 59: mod_base = OTHER; note = 2'-O-methyl modified nucleotide
  modified_base 61: mod_base = OTHER; note = 2'-O-methyl modified nucleotide
  modified_base 62: mod_base = OTHER; note = 2'-O-methyl modified nucleotide
  modified_base 63: mod_base = OTHER; note = 2'-O-methyl modified nucleotide
  modified_base 64: mod_base = OTHER; note = 2'-O-methyl modified nucleotide
  modified_base 65: mod_base = OTHER; note = 2'-O-methyl modified nucleotide
  modified_base 66: mod_base = OTHER; note = 2'-O-methyl modified nucleotide
  modified_base 67: mod_base = OTHER; note = 2'-O-methyl modified nucleotide
  modified_base 68: mod_base = OTHER; note = 2'-O-methyl modified nucleotide
  modified_base 69: mod_base = OTHER; note = 2'-O-methyl modified nucleotide
  modified_base 70: mod_base = OTHER; note = 2'-O-methyl modified nucleotide
  modified_base 75: mod_base = OTHER; note = 2'-O-methyl modified nucleotide
  modified_base 77: mod_base = OTHER; note = 2'-O-methyl modified nucleotide
  modified_base 80: mod_base = OTHER; note = 2'-O-methyl modified nucleotide
  modified_base 86: mod_base = OTHER; note = 2'-O-methyl modified nucleotide
  modified_base 87: mod_base = OTHER; note = 2'-O-methyl modified nucleotide
  modified_base 89: mod_base = OTHER; note = 2'-O-methyl modified nucleotide
  modified_base 90: mod_base = OTHER; note = 2'-O-methyl modified nucleotide
  modified_base 91: mod_base = OTHER; note = 2'-O-methyl modified nucleotide
  modified_base 92: mod_base = OTHER; note = 2'-O-methyl modified nucleotide
  modified_base 99: mod_base = OTHER; note = Nucleotide with phosphorothioate linkage
  modified_base 100: mod_base = OTHER; note = 2'-O-methyl modified nucleotide with phosphorothioate linkage
  modified_base 101: mod_base = OTHER; note = 2'-O-methyl modified nucleotide

SEQ ID NO: 400 - RNA, 145 nt, synthetic construct
  source 1..145: mol_type = other RNA
  misc_difference 1: note = a, c, u, g, unknown or other
  misc_difference 2: note = a, c, u, g, unknown or other
  misc_difference 3: note = a, c, u, g, unknown or other
  misc_difference 4: note = a, c, u, g, unknown or other
  misc_difference 5: note = a, c, u, g, unknown or other
  misc_difference 6: note = a, c, u, g, unknown or other
  misc_difference 7: note = a, c, u, g, unknown or other
  misc_difference 8: note = a, c, u, g, unknown or other
  misc_difference 9: note = a, c, u, g, unknown or other
  misc_difference 10: note = a, c, u, g, unknown or other
  misc_difference 11: note = a, c, u, g, unknown or other
  misc_difference 12: note = a, c, u, g, unknown or other
  misc_difference 13: note = a, c, u, g, unknown or other
  misc_difference 14: note = a, c, u, g, unknown or other
  misc_difference 15: note = a, c, u, g, unknown or other
  misc_difference 16: note = a, c, u, g, unknown or other
  misc_difference 17: note = a, c, u, g, unknown or other
  misc_difference 18: note = a, c, u, g, unknown or other
  misc_difference 19: note = a, c, u, g, unknown or other
  misc_difference 20: note = a, c, u, g, unknown or other
  misc_difference 21: note = a, c, u, g, unknown or other
  misc_difference 22: note = a, c, u, g, unknown or other
  misc_difference 23: note = a, c, u, g, unknown or other
  misc_difference 24: note = a, c, u, g, unknown or other
nnnnnnnnnnnnnnnnnnnnnnnngttgtagctccctttctcatttcggaaacgaaatgagaaccgttgctacaataaggccgtctgaaaagatgtgccgcaacgctctgccccttaaagcttctgctttaaggggcatcgttta

SEQ ID NO: 401 - protein, 6 aa, synthetic construct
HHHHHH

SEQ ID NO: 402 - protein, 8 aa, synthetic construct
HHHHHHHH

SEQ ID NO: 403 - RNA, 100 nt, synthetic construct
  source 1..100: mol_type = other RNA
aaaaaaaaaaaaaaaaaaaaaaaaaaaaaaaaaaaaaaaaaaaaaaaaaaaaaaaaaaaaaaaaaaaaaaaaaaaaaaaaaaaaaaaaaaaaaaaaaaaa

SEQ ID NO: 404 - RNA, 12 nt, synthetic construct
  source 1..12: mol_type = other RNA
  misc_difference 1..12: note = This sequence may encompass 8-12 nucleotides
aaaaaaaaaaaa

SEQ ID NO: 405 - RNA, 50 nt, synthetic construct
  source 1..50: mol_type = other RNA
  misc_difference 1..50: note = This sequence may encompass 8-50 nucleotides
aaaaaaaaaaaaaaaaaaaaaaaaaaaaaaaaaaaaaaaaaaaaaaaaaa

SEQ ID NO: 406 - RNA, 100 nt, synthetic construct; identical to SEQ ID NO: 403
  source 1..100: mol_type = other RNA
  misc_difference 1..100: note = This sequence may encompass 8-100 nucleotides

SEQ ID NO: 407 - protein, 60 aa, synthetic construct
  VARIANT 1: note = Any amino acid
  VARIANT 3: note = Any amino acid
  VARIANT 5: note = Any amino acid
  VARIANT 7: note = Any amino acid
  VARIANT 9: note = Any amino acid
  VARIANT 11: note = Any amino acid
  VARIANT 13: note = Any amino acid
  VARIANT 15: note = Any amino acid
  VARIANT 17: note = Any amino acid
  VARIANT 19: note = Any amino acid
  VARIANT 21: note = Any amino acid
  VARIANT 23: note = Any amino acid
  VARIANT 25: note = Any amino acid
  VARIANT 27: note = Any amino acid
  VARIANT 29: note = Any amino acid
  VARIANT 31: note = Any amino acid
  VARIANT 33: note = Any amino acid
  VARIANT 35: note = Any amino acid
  VARIANT 37: note = Any amino acid
  VARIANT 39: note = Any amino acid
  VARIANT 41: note = Any amino acid
  VARIANT 43: note = Any amino acid
  VARIANT 45: note = Any amino acid
  VARIANT 47: note = Any amino acid
  VARIANT 49: note = Any amino acid
  VARIANT 51: note = Any amino acid
  VARIANT 53: note = Any amino acid
  VARIANT 55: note = Any amino acid
  VARIANT 57: note = Any amino acid
  VARIANT 59: note = Any amino acid
  VARIANT 1..60: note = This sequence may encompass 1-30 XP repeating units
XPXPXPXPXPXPXPXPXPXPXPXPXPXPXPXPXPXPXPXPXPXPXPXPXPXPXPXPXPXP

1. A method of genetically modifying a cell, comprising:
(a) contacting the cell with a first genome editing tool, wherein the first genome editing tool comprises a first genomic editor and at least one guide RNA (gRNA) that targets at least one genomic locus and that is cognate to the first genomic editor; and
(b) contacting the cell with a second genome editing tool, wherein the second genome editing tool comprises a second genomic editor and at least one gRNA that targets at least one genomic locus and that is cognate to the second genomic editor, wherein the first genomic editor is orthogonal to the second genomic editor,
thereby producing at least two genome edits in the cell.

2. The method of claim 1, wherein the first genomic editor or the second genomic editor is delivered to the cell as at least one polypeptide or at least one polynucleotide that encodes the polypeptide.

3. (canceled)

4. (canceled)

5. The method of claim 1, wherein:
(a) the first genomic editor comprises a cleavase, a nickase, a catalytically inactive nuclease, a base editor, or a fusion protein comprising a DNA polymerase and a nickase; and/or
(b) the second genomic editor comprises a cleavase, a nickase, a catalytically inactive nuclease, a base editor, or a fusion protein comprising a DNA polymerase and a nickase.

6. (canceled)

7. The method of claim 1, wherein one of the first genomic editor and the second genomic editor comprises a base editor, and the other of the first genomic editor and the second genomic editor comprises a cleavase.

8. The method of claim 7, further comprising contacting the cell with a nucleic acid encoding an exogenous gene.

9. The method of claim 1, wherein one of the first genomic editor and second genomic editor comprises an N. meningitidis (Nme) RNA-guided nickase or cleavase, and the other of the first genomic editor and the second genomic editor comprises an S. pyogenes (Spy) RNA-guided nickase or cleavase.

10. (canceled)

11. The method of claim 1, wherein
(a) the first genomic editor comprises a base editor, and the at least one guide RNA (gRNA) that targets at least one genomic locus is cognate to the base editor; and
(b) the second genomic editor comprises an RNA-guided cleavase, and the at least one gRNA that targets at least one genomic locus is cognate to the RNA-guided cleavase, wherein the base editor is orthogonal to the RNA-guided cleavase.

12. The method of claim 11, further comprising:
culturing the cell, thereby producing a population of cells comprising edited cells comprising at least two genome edits per cell.

13. The method of claim 11, wherein the base editor is a C to T base editor, or is an A to G base editor.

14. The method of claim 1, wherein one of the at least two genome edits comprises a double-stranded break, and another one of the at least two genome edits comprises a transition or base edit.

15. (canceled)

16. The method of claim 1, wherein step (a) and step (b) are performed simultaneously.

17. (canceled)

18. The method of claim 1, wherein the first genomic editor is delivered to the cell as a nucleic acid comprising: (a) a nucleotide sequence that is at least 80%, 85%, 90%, 95%, 98%, or 100% identical to SEQ ID NO: 1, and the second genomic editor is delivered to the cell as a nucleic acid comprising a nucleotide sequence that is at least 80%, 85%, 90%, 95%, 98%, or 100% identical to any one of SEQ ID NOs: 180-190; or (b) a nucleotide sequence that is at least 80%, 85%, 90%, 95%, 98%, or 100% identical to SEQ ID NO: 147 or 310, and the second genomic editor is delivered to the cell as a nucleic acid comprising a nucleotide sequence that is at least 80%, 85%, 90%, 95%, 98%, or 100% identical to SEQ ID NO: 293 or 295.

19. (canceled)

20. (canceled)

21. (canceled)

22. (canceled)

23. The method of claim 1, wherein the first genomic editor comprises a Cas9 nickase.

24. (canceled)

25. (canceled)

26. The method of claim 1, wherein the second genomic editor comprises a Cas9 cleavase.

27. (canceled)

28. (canceled)

29. (canceled)

30. (canceled)

31. The method of claim 1, wherein: (a) at least one gRNA that is cognate to the first genomic editor is non-cognate to the second genomic editor; and/or (b) wherein at least one gRNA that is cognate to the second genomic editor is non-cognate to the first genomic editor.

32. (canceled)

33. The method of claim 1, wherein the at least one gRNA that is cognate to the first genomic editor comprises: (a) at least two gRNAs that target at least two different genomic loci, (b) at least three gRNAs that target at least three different genomic loci, (c) at least four gRNAs that target at least four different genomic loci, or (d) at least five gRNAs that target at least five different genomic loci.

34. (canceled)

35. (canceled)

36. (canceled)

37. A composition, comprising:
(a) a first genome editing tool, wherein the first genome editing tool comprises a first genomic editor, and at least one guide RNA (gRNA) that targets at least one genomic locus and that is cognate to the first genomic editor; and
(b) a second genome editing tool, wherein the second genome editing tool comprises a second genomic editor, and at least one gRNA that targets at least one genomic locus and that is cognate to the second genomic editor, wherein the first genomic editor is orthogonal to the second genomic editor.

38. The composition of claim 37, wherein the first genomic editor or the second genomic editor comprises at least one polypeptide or at least one mRNA; and/or
wherein the at least one gRNA comprises at least one polynucleotide that encodes the gRNA.

39. (canceled)

40. The composition of claim 37, wherein:
(a) the first genomic editor comprises a cleavase, a nickase, a catalytically inactive nuclease, a base editor, or a fusion protein comprising a DNA polymerase and a nickase; and/or
(b) the second genomic editor comprises a cleavase, a nickase, a catalytically inactive nuclease, a base editor, or a fusion protein comprising a DNA polymerase and a nickase.

41. (canceled)

42. The composition of claim 37, wherein one of the first genomic editor and the second genomic editor comprises a base editor, and the other of the first genomic editor and the second genomic editor comprises a cleavase.

43. The composition of claim 42, further comprising a nucleic acid encoding an exogenous gene.

44. The composition of claim 37, wherein one of the first genomic editor and the second genomic editor comprises a C to T base editor, and the other of the first genomic editor and the second genomic editor comprises an A to G base editor.

45. The composition of claim 37, wherein one of the first genomic editor and the second genomic editor comprises an N. meningitidis (Nme) RNA-guided nickase, and the other of the first genomic editor and the second genomic editor comprises an S. pyogenes (Spy) RNA-guided nickase.

46. (canceled)

47. A composition, comprising:
(a) a first genome editing tool, wherein the first genome editing tool comprises a first genomic editor comprising a base editor, and at least one guide RNA (gRNA) that targets at least one genomic locus and that is cognate to the base editor; and
(b) a second genome editing tool comprising a second genomic editor comprising an RNA-guided cleavase, and at least one gRNA that targets at least one genomic locus and that is cognate to the RNA-guided cleavase, wherein the base editor is orthogonal to the RNA-guided cleavase.

48. The composition of claim 47, wherein the base editor is a C to T base editor or is an A to G base editor.

49. (canceled)

50. (canceled)

51. The composition of claim 37, wherein the first genomic editor is a nucleic acid comprising: (a) a nucleotide sequence that is at least 80%, 85%, 90%, 95%, 98%, or 100% identical to SEQ ID NO: 1, and the second genomic editor is a nucleic acid comprising a nucleotide sequence that is at least 80%, 85%, 90%, 95%, 98%, or 100% identical to any one of SEQ ID NOs: 180-190; or (b) a nucleotide sequence that is at least 80%, 85%, 90%, 95%, 98%, or 100% identical to SEQ ID NO: 147 or 310, and the second genomic editor is a nucleic acid comprising a nucleotide sequence that is at least 80%, 85%, 90%, 95%, 98%, or 100% identical to SEQ ID NO: 293 or 295.

52. (canceled)

53. (canceled)

54. (canceled)

55. (canceled)

56. The composition of claim 37, wherein the first genomic editor comprises a Cas9 nickase.

57. (canceled)

58. (canceled)

59. The composition of claim 37, wherein the second genomic editor comprises a Cas9 cleavase.

60. (canceled)

61. (canceled)

62. (canceled)

63. (canceled)

64. The composition of claim 37, wherein: (a) the at least one gRNA that is cognate to the first genomic editor is non-cognate to the second genomic editor; and/or (b) the at least one gRNA that is cognate to the second genomic editor is non-cognate to the first genomic editor.

65. (canceled)

66. (canceled)

67. The composition of claim 37, wherein the at least one gRNA that is cognate to the first genomic editor comprises: (a) at least two gRNAs that target at least two different genomic loci, (b) at least three gRNAs that target at least three different genomic loci, (c) at least four gRNAs that target at least four different genomic loci, or (d) at least five gRNAs that target at least five different genomic loci.

68. (canceled)

69. (canceled)

70. (canceled)

71. The composition of claim 67, wherein the first genomic editor and one, two, three, four, five, or six of the at least one gRNA that are cognate to the first genomic editor and target different genomic loci are contained in a same lipid nanoparticle (LNP).

72. (canceled)

73. (canceled)

74. (canceled)

75. (canceled)

76. A cell, wherein the cell is treated in vitro with the method er of claim 1.

77. The cell of claim 76, wherein the cell is a human cell.

78. (canceled)

79. (canceled)

80. A population of cells, comprising the cell of claim 76.

81. (canceled)

82. A method for treating cancer, comprising administering to a subject in need thereof the cell of claim 76.

83. (canceled)

84. (canceled)
